(19) United States
(12) Patent Application Publication
(10) Pub. No.: US 2018/0362598 A1
(43) Pub. Date: Dec. 20, 2018

(54) CLEAVABLE PEPTIDES AND INSECTICIDAL AND NEMATICIDAL PROTEINS COMPRISING SAME

(71) Applicant: VESTARON CORPORATION, KALAMAZOO, MI (US)

(72) Inventors: ALVAR R. CARLSON, KALAMAZOO, MI (US); ALEXANDRA M. HAASE, MARTIN, MI (US); ROBERT M. KENNEDY, DEXTER, MI (US)

(73) Assignee: VESTARON CORPORATION, KALAMAZOO, MI (US)

(21) Appl. No.: 15/727,277

(22) Filed: Oct. 6, 2017

Related U.S. Application Data
(60) Provisional application No. 62/411,117, filed on Oct. 21, 2016.

(51) Int. Cl. C07K 14/415; C07K 7/06; C07K 5/103; C07K 14/435; C07K 14/325; A01N 63/02; C12N 15/82

(52) U.S. Cl. CPC C07K 14/415; C07K 7/06; C07K 5/101; C07K 14/43518; C07K 14/325; C07K 2319/04; C12N 15/8285; C12N 15/8286; C07K 2319/50; C07K 2319/55; A01N 63/02

(57) ABSTRACT

A peptide comprised of either a binary or a tertiary peptide, the peptide contains at least 4 amino acids and up to a maximum of 16 amino acids, comprised of 2 or 3 different regions, wherein the binary peptides have 2 different regions and the tertiary peptides have 3 different regions; wherein, the peptide can be cleaved by both an animal gut protease and an insect or nematode gut protease.

### CROSS REFERENCE TO RELATED APPLICATIONS

[0001] This application claims the benefit of, and priority to, U.S. Provisional Application Ser. No. 62/411,117, filed on Oct. 21, 2016, the disclosure of which is incorporated by reference herein in its entirety.

### SEQUENCE LISTING

[0002] This application incorporates by reference in its entirety the Sequence Listing entitled “FAM_O_US_225312_419533_SEQ_LIST_2017_10_06_ST25.txt” (5.37 MB), which was created on Oct. 6, 2017, and filed electronically herewith.”

### FIELD OF THE INVENTION

[0003] New insecticidal and nematicidal proteins, cleavable peptides, DNA constructs encoding same, transgenic proteins, their expression in plants, methods of producing the transgenic proteins, new processes, production techniques, new peptides, new formulations, and combinations of new and known insecticidal and nematicidal proteins contained within transgenic proteins that produce greater pest resistance than would be expected of related insecticidal and nematicidal proteins for the control of insects and nematodes are described and claimed.

### BACKGROUND

[0004] The global security of food produced by modern agriculture and horticulture is challenged by insect pests. Farmers rely on insecticides to suppress insect damage, yet commercial options for safe and functional insecticides available to farmers are diminishing through the removal of dangerous chemicals from the marketplace and the evolution of insect strains that are resistant to all major classes of chemical and biological insecticides. New insecticides are necessary for farmers to maintain crop protection.

[0005] Insecticidal and nematicidal peptides, polypeptides and proteins are peptide and protein polymers that are toxic to their targets, usually insects or nematodes. The insecticidal peptides or toxins commonly derive from arthropod origins such as from scorpions or spiders. The toxins can be delivered directly to the insect's gut or internal organs by injection or by inducing the insect to consume the toxin from its food, for example an insect feeding upon a transgenic plant. These toxins have been known to have the ability to inhibit the growth, impair the movement, or even kill an insect when the toxin is delivered to the insect by spreading the toxin to the locus inhabited by the insect or to the insect's environment by spraying, or other means. Through direct exposure, or ingestion, the insect comes into some form of contact with the toxic peptide, polypeptide or protein.

[0006] Insecticidal peptides however have enormous problems reaching the commercial market and to date there have been few if any insecticidal peptides approved and marketed for the commercial market, with one notable exception, peptides derived from Bacillus thuringiensis or Bt. There is presently, great concern over rising insect resistance to Bt proteins.

[0007] Bt proteins, or Bt peptides, are effective insecticides used for crop protection in the form of both plant incorporated protectants and foliar sprays. Commercial formulations of Bt proteins are widely used to control insects at the larval stage. Inhibitory cysteine knot motif (ICK) proteins are also a class of insecticidal peptides which are derived from arthropod origins, such as the venoms of scorpions or spiders.

[0008] Other classes and types of potential peptides have been identified, such as Trypsin modulating oostatic factor (TMOF) peptides. TMOF peptides have to be delivered to their physiological site of action for insecticidal activity to ensue. TMOF peptides have been identified as potential larvicides, with great potential, see D. Borovsky, Journal of Experimental Biology 206, 3869-3875, but like nearly all other insecticidal peptides, TMOF has not been commercialized or widely used by farmers and there are reasons for this.

[0009] The ability to successfully produce insecticidal peptides on a commercial scale, with reproducible peptide formation and folding, at a reasonable and economical price, can be a significant obstacle to commercialization. The wide variety, unique properties and special nature of insecticidal peptides, combined with the huge variety of possible production techniques, can present an overwhelming number of approaches to peptide application and production, but few, if any, are commercially successful.

[0010] There are several reasons why so few of the multitude insecticidal peptides that have been identified have ever made it to market. First, most insecticidal peptides are either too delicate or not toxic enough to be used commercially. Second, insecticidal peptides are difficult and costly to produce commercially. Third, many insecticidal peptides quickly degrade and have a short half-life. Fourth, very few insecticidal peptides fold properly when then are expressed by a plant, thus they lose their toxicity in genetically modified organisms (GMOs) such as genetically modified plants. Fifth, most of the identified insecticidal peptides are blocked from systemic distribution in the insect and/or lose their toxic nature when consumed by insects. Bt proteins are an exception to this last problem and because they disrupt insect feeding they have been widely used.

[0011] The present invention provides several solutions to these major problems which have prevented commercialization and wide spread use of insecticidal peptides. The present invention provides transgenic proteins that enable the synthesis and release of insecticidal and nematicidal toxic peptides in relatively large numbers at the site of activity, i.e., the gut or other organs of the insect or nematode. The synthesis in the host is facilitated by directed expression in regions of the host cell that enables proper folding of the transgenic protein and enhances synthesis in the host cell.

### SUMMARY OF THE EXEMPLARY EMBODIMENTS OF THE INVENTION

[0012] The present invention provides cleavable peptides that are fused to toxic insecticidal and/or nematicidal toxic peptides and proteins that can be expressed and synthesized in a host cell, for example a plant cell that is subject to consumption by an insect or nematode pest. The cleavable peptides may be cleaved in the gut environment and/or hemolymph environment of an insect and/or nematode and in the gastrointestinal system of a human being thereby releasing its payload comprising one or more insecticidal and/or nematicidal toxic peptides and proteins.

[0013] In a first aspect, the present invention provides cleavable peptides comprising a binary or a tertiary peptide that contains at least 4 amino acids and up to a maximum of 16 amino acids, comprised of 2 or 3 different regions. In one example, the binary peptides have two different regions (an insect or nematode cleavable region and an animal (e.g. human) gut cleavable region) and the tertiary peptides have the same two regions of a binary peptide but also includes one additional region not found in a binary peptide; and wherein the binary and tertiary peptide can be cleaved by both an animal gut protease and an insect or nematode gut protease. In some embodiments, the cleavable peptides of the present invention (binary and tertiary cleavable peptides (L)) cannot be cleaved in a plant cell with an endogenous plant protease, or by a naturally occurring plant protease.

[0014] In a related embodiment, exemplary binary peptides comprise an amino acid sequence of X₁-X₂-Y₁-Y₂, X₁-X₂-X₃-Y₁-Y₂, X₁-X₂-X₃-X₄-Y₁-Y₂, X₁-X₂-Y₁-Y₂-Y₃, X₁-X₂-X₃-Y₁-Y₂-Y₃, X₁-X₂-X₃-X₄-Y₁-Y₂-Y₃, X₁-X₂-Y₁-Y₂-Y₃-Y₄, X₁-X₂-X₃-Y₁-Y₂-Y₃-Y₄, X₁-X₂-X₃-X₄-Y₁-Y₂-Y₃-Y₄, Y₁-Y₂-X₁-X₂, Y₁-Y₂-X₁-X₂-X₃, Y₁-Y₂-X₁-X₂-X₃-X₄, Y₁-Y₂-Y₃-X₁-X₂, Y₁-Y₂-Y₃-X₁-X₂-X₃, Y₁-Y₂-Y₃-X₁-X₂-X₃-X₄, Y₁-Y₂-Y₃-Y₄-X₁-X₂, Y₁-Y₂-Y₃-Y₄-X₁-X₂-X₃, Y₁-Y₂-Y₃-Y₄-X₁-X₂-X₃-X₄, wherein each Xₙ and each Yₙ is an amino acid and wherein X₁ is selected from the group consisting of: (all single letter amino acid format) A, D, E, G, I, K, L, N, P, Q, R, and V; X₂ is selected from the group consisting of A, F, G, I, K, L, N, P, Q, R, S, T, V, and Y; X₃ is selected from the group consisting of A, D, E, F, G, I, K, L, N, Q, R, S, T, V, and Y; X₄ is selected from the group consisting of: R, H, K, D, E, S, T, N, Q, G, A, I, L, M, F, W, Y, and V. In some embodiments, Y₁ is selected from the group consisting of: (all single letter amino acid format) A, D, E, F, G, I, L, N, Q, S, T, V, and Y; Y₂ is selected from the group consisting of F, G, I, L, and Y; and Y₃ is selected from the group consisting of A, D, E, F, G, I, K, L, R, S, T, V, and Y; and Y₄ is selected from the group consisting of: R, H, K, D, E, S, T, N, Q, G, A, I, L, M, F, W, Y, and V.

[0015] In another related aspect, a tertiary peptide of the present invention contains at least 5 amino acids up to a maximum of 16 amino acids; wherein the tertiary peptide comprises a binary peptide and a spacer of 1 to 4 amino acids. In some embodiments, the spacer comprises the amino acid sequence GS and is fused in frame to the N-terminus of a binary peptide, or to the C-terminus of the binary peptide, or both to the N-terminus and the C-terminus of a binary peptide as disclosed herein.

[0016] In a second aspect, the present invention provides an insecticidal and/or nematicidal protein having a cleavable peptide (a binary or a tertiary peptide) fused in frame with an insecticidal or nematicidal toxic protein. In another embodiment, the present invention provides an insecticidal and/or nematicidal protein having two or more cleavable peptides, wherein the insecticidal and/or nematicidal protein comprises a binary or tertiary peptide, the binary or tertiary peptide is fused in frame with a construct comprising (TP-L)ₙ, wherein n is an integer ranging from 1 to 200, or from 1 to 100, or from 1 to 10. In another embodiment, the insecticidal and/or nematicidal protein described herein comprises an endoplasmic reticulum signal peptide (ERSP) fused in frame with: a binary peptide or tertiary peptide, which is fused in frame with an insecticidal or nematicidal toxic protein and/or a repeat construct (L-TP)ₙ or (TP-L)ₙ, wherein n is an integer ranging from 1 to 200, or from 1 to 100, or from 1 to 10. In various embodiments, an exemplary insecticidal and/or nematicidal protein can include a protein construct comprising: (ERSP)-(TP-L)ₙ, or (ERSP)-(L)-(TP-L)ₙ, or (ERSP)-(L-TP)ₙ, or (ERSP)-(L-TP)ₙ-(L), wherein n is an integer ranging from 1 to 200. In various related embodiments described above, TP is a toxic protein, L is a binary or tertiary peptide and n is an integer ranging from 1 to 200, preferably an integer ranging from 1 to 100, and more preferably an integer ranging from 1 to 10. In some embodiments, the insecticidal and/or nematicidal protein may contain TPs that are the same or different, and binary and/or tertiary peptides that are the same or different. In some embodiments, the C-terminal TP is fused or unfused at its C-terminus with a binary or tertiary peptide. In some embodiments, the N-terminal TP is fused or unfused at its N-terminus with a binary or tertiary peptide.

[0017] In another embodiment, the present invention provides an insecticidal and/or nematicidal protein having two or more cleavable peptides, wherein the insecticidal and/or nematicidal protein comprises a stabilizing domain (STA) fused in frame with either the N-terminus of a binary or tertiary peptide, or the N-terminus of a construct comprising: (L-TP)ₙ, (L-TP)ₙ-L, (TP-L)ₙ, or L-(TP-L)ₙ. In some related embodiments, an insecticidal and/or nematicidal protein comprises an ERSP fused in frame with the N-terminus of a stabilizing domain (STA), which is fused in frame with either the N-terminus of a binary or tertiary peptide, being fused to the N-terminus of a toxic protein, or the N-terminus of a construct comprising: (L-TP)ₙ, (L-TP)ₙ-L, (TP-L)ₙ, or L-(TP-L)ₙ.

[0018] In various embodiments, an exemplary insecticidal and/or nematicidal protein can include a construct comprising: (ERSP)-(STA)-(L-TP)ₙ, or (ERSP)-(STA)-(L-TP)ₙ-(L), or (ERSP)-(STA)-(TP-L)ₙ, or (ERSP)-(STA)-(L)-(TP-L)ₙ, or (STA)-(L-TP)ₙ, or (STA)-(L-TP)ₙ-(L), or (STA)-(TP-L)ₙ, or (STA)-(L)-(TP-L)ₙ. In some related embodiments, an insecticidal and/or nematicidal protein comprises an ERSP fused in frame with either the N-terminus of a binary or tertiary peptide, being fused to the N-terminus of a toxic protein, or the N-terminus of a construct comprising: (L-TP)ₙ, (L-TP)ₙ-L, (TP-L)ₙ, or L-(TP-L)ₙ. In various embodiments, an exemplary insecticidal and/or nematicidal protein can include a construct comprising: (ERSP)-(L-TP)ₙ, or (ERSP)-(L-TP)ₙ-(L), or (ERSP)-(TP-L)ₙ, or (ERSP)-(L)-(TP-L)ₙ. In various embodiments as described herein and above, TP is defined as a toxic protein, that is toxic to an insect and/or a nematode, L is a binary or tertiary peptide and n is an integer ranging from 1 to 200, preferably an integer ranging from 1 to 100, and more preferably an integer ranging from 1 to 10. In some embodiments, the C-terminal TP of a construct described herein and above is fused or unfused at its C-terminus with a binary or tertiary peptide. In some embodiments, the N-terminal TP is fused or unfused at its N-terminus with a binary or tertiary peptide.

[0019] In another related aspect, the present invention provides a plant, or part thereof comprising an insecticidal and/or nematicidal protein as exemplified herein. In related embodiments, the present invention provides a plant, or part thereof comprising a polynucleotide operably linked to an operable promoter for example, a homologous or heterologous promoter, in a DNA construct, for example, an expression vector, wherein the polynucleotide encodes: an insecticidal and/or nematicidal protein comprising a peptide comprising either a binary or a tertiary peptide, the binary and/or the tertiary peptide containing at least 4 amino acids and up to a maximum of 16 amino acids, and is comprised of 2 or 3 different regions, wherein the binary peptide has 2 different regions and the tertiary peptide has 3 different regions; wherein, the binary and/or the tertiary peptide can be cleaved by both an animal gut protease (for example a human gut protease) and an insect or nematode gut protease, and wherein the binary or tertiary peptide (L) is fused in frame to a toxic protein (TP). In some embodiments, the insecticidal and/or nematicidal protein comprises a repeat construct (L-TP)ₙ or (TP-L)ₙ wherein n is an integer ranging from 1 to 200, or from 1 to 100, or from 1 to 10. In related embodiments, the binary and/or the tertiary peptide is operably fused at its N-terminus to the C-terminus of an Endoplasmic Reticulum Signal Peptide (ERSP) and at its C-terminus operably fused to the N-terminus of a TP. See FIGS. 4, 5 and 6C. In a related embodiment, the plant or part thereof, comprises an insecticidal and/or nematicidal protein and/or a polynucleotide that encodes an insecticidal and/or nematicidal protein as exemplified herein, wherein the insecticidal and/or nematicidal protein comprises a binary or tertiary peptide, the binary or tertiary peptide is fused in frame with a construct comprising (TP-L)ₙ, or the insecticidal and/or nematicidal protein comprises a repeat construct (L-TP)ₙ or (TP-L)ₙ, wherein n is an integer ranging from 1 to 200, or from 1 to 100, or from 1 to 10. In a related embodiment, the plant or part thereof, comprises an insecticidal and/or nematicidal protein and/or a polynucleotide that encodes an insecticidal and/or nematicidal protein as exemplified herein, wherein the insecticidal and/or nematicidal protein comprises an ERSP fused in frame with the N-terminus of a binary or tertiary peptide, the binary or tertiary peptide is fused in frame with a construct comprising (TP-L)ₙ or the insecticidal and/or nematicidal protein comprises an ERSP fused in frame with a binary peptide and/or a repeat construct (L-TP)ₙ or (TP-L)ₙ. See FIGS. 4, 5, and 6C. In various embodiments, the exemplary insecticidal and/or nematicidal protein can include the construct: (ERSP)-(TP-L)ₙ, or (ERSP)-(L)-(TP-L)ₙ, or (ERSP)-(L-TP)ₙ, or (ERSP)-(L-TP)ₙ-(L). In another embodiment, a plant, or part thereof comprises a polynucleotide operably linked to an operable promoter, for example, a homologous or heterologous promoter, wherein the polynucleotide encodes an insecticidal and/or nematicidal protein comprising an ERSP fused in frame with the N-terminus of a stabilizing domain (STA). See FIG. 3, FIG. 5, and FIG. 6C. The STA is fused in frame with either the N-terminus of a binary or tertiary peptide, or the N-terminus of a construct comprising: (L-TP)ₙ, (L-TP)ₙ-L, (TP-L)ₙ, or L-(TP-L)ₙ. In various embodiments, the exemplary insecticidal and/or nematicidal protein can include: (ERSP)-(STA)-(L-TP)ₙ, or (ERSP)-(STA)-(L-TP)ₙ-(L), or (ERSP)-(STA)-(TP-L)ₙ, or (ERSP)-(STA)-(L)-(TP-L)ₙ, or (STA)-(L-TP)ₙ, or (STA)-(L-TP)ₙ-(L), or (STA)-(TP-L)ₙ, or (STA)-(L)-(TP-L)ₙ. In various embodiments, TP is toxic protein, which may be an insecticidal protein and/or a nematicidal protein as described and exemplified in the present disclosure, L is a binary or tertiary peptide and n is an integer ranging from 1 to 200, or from 10 to 175, or from 20 to 150, or from 30 to 100, or from 40 to 100, or from 20 to 70, or from 20 to 60, or from 20 to 50, or from 20 to 40, or from 30-40. In some embodiments, n is an integer ranging from 1 to 20, or from 5 to 20, or from 10 to 20, or from 20 to 80, or from 30 to 60, or from 30 to 50 and preferably around or about or specifically 20, 25, 30, 35, 40, 45 or 50. In some embodiments, the insecticidal and/or nematicidal protein may contain TPs that are the same or different, and binary and/or tertiary peptides that are the same or different. In some embodiments, the C-terminal TP is fused or unfused at its C-terminus with a binary or tertiary peptide.

[0020] In a third aspect, the present invention provides a method of controlling a pest infection or infestation of a plant. The method comprises providing in a diet of said pest, a plant, or part thereof, or a plant cell, said plant, part thereof, or plant cell comprising an insecticidal and/or nematicidal protein as exemplified herein, and/or a DNA construct comprising at least one polynucleotide operably linked to an operable promoter, for example, a homologous or heterologous promoter, wherein the polynucleotide encodes an insecticidal and/or nematicidal protein having one or more cleavable binary and/or tertiary peptides. In a related embodiment, the plant or part thereof, comprises a DNA construct that encodes an insecticidal and/or nematicidal protein, wherein the insecticidal and/or nematicidal protein comprises a binary or tertiary peptide which is fused in frame with a construct comprising (TP-L)ₙ or a repeat construct (L-TP)ₙ, (L-TP)ₙ-L, (TP-L)ₙ, or L-(TP-L)ₙ wherein n is an integer ranging from 1 to 200, or from 10 to 175, or from 20 to 150, or from 30 to 100, or from 40 to 100, or from 20 to 70, or from 20 to 60, or from 20 to 50, or from 20 to 40, or from 30-40. In some embodiments, n is an integer ranging from 1 to 20, or from 5 to 20, or from 10 to 20, or from 20 to 80, or from 30 to 60, or from 30 to 50 and preferably around or about or specifically 20, 25, 30, 35, 40, 45 or 50. In a related embodiment, the plant or part thereof, comprises a DNA construct that encodes an insecticidal and/or nematicidal protein, wherein the insecticidal and/or nematicidal protein comprises an ERSP fused in frame with the N-terminus of a binary or tertiary peptide, the binary or tertiary peptide is fused in frame with a construct comprising (TP-L)ₙ or the insecticidal and/or nematicidal protein comprises an ERSP fused in frame with a binary peptide and/or a repeat construct (L-TP)ₙ or (TP-L)ₙ. In various embodiments, the exemplary insecticidal and/or nematicidal protein can include: (ERSP)-(TP-L)ₙ, or (ERSP)-(L)-(TP-L)ₙ, or (ERSP)-(L-TP)ₙ, or (ERSP)-(L-TP)ₙ-(L), wherein n is an integer ranging from 1 to 200, or from 10 to 175, or from 20 to 150, or from 30 to 100, or from 40 to 100, or from 20 to 70, or from 20 to 60, or from 20 to 50, or from 20 to 40, or from 30-40. In some embodiments, n is an integer ranging from 1 to 20, or from 5 to 20, or from 10 to 20, or from 20 to 80, or from 30 to 60, or from 30 to 50 and preferably around or about or specifically 20, 25, 30, 35, 40, 45 or 50.

[0021] In another embodiment the plant or part thereof, comprises a DNA construct that encodes an insecticidal and/or nematicidal protein, wherein the insecticidal and/or nematicidal protein comprises an ERSP fused in frame with the N-terminus of a stabilizing domain (STA). The STA is fused in frame with either the N-terminus of a binary or tertiary peptide, or the N-terminus of a construct comprising: (L-TP)ₙ, (L-TP)ₙ-L, (TP-L)ₙ, or L-(TP-L)ₙ. In various embodiments, the exemplary insecticidal and/or nematicidal protein can include a construct from N-terminus to C-terminus: (STA)-(TP-L)ₙ, or (STA)-(L)-(TP-L)ₙ, or (STA)-(L-TP)ₙ, or (STA)-(L-TP)ₙ-(L), wherein n is an integer ranging from 1 to 200, or from 10 to 175, or from 20 to 150, or from 30 to 100, or from 40 to 100, or from 20 to 70, or from 20 to 60, or from 20 to 50, or from 20 to 40, or from 30-40. In some embodiments, n is an integer ranging from 1 to 20, or from 5 to 20, or from 10 to 20, or from 20 to 80, or from 30 to 60, or from 30 to 50 and preferably around or about or specifically 20, 25, 30, 35, 40, 45 or 50. In various embodiments, the exemplary insecticidal and/or nematicidal protein can include a construct from N-terminus to C-terminus: (ERSP)-(STA)-(L-TP)ₙ, or (ERSP)-(STA)-(L-TP)ₙ-(L), or (ERSP)-(STA)-(TP-L)ₙ, or (ERSP)-(STA)-(L)-(TP-L)ₙ, or (STA)-(L-TP)ₙ, or (STA)-(L-TP)ₙ-(L), or (STA)-(TP-L)ₙ, or (STA)-(L)-(TP-L)ₙ. In various embodiments, TP is toxic protein, L is a binary or tertiary peptide and n is an integer ranging from 1 to 200, preferably an integer ranging from 1 to 100, and more preferably an integer ranging from 1 to 10. In some embodiments, the insecticidal and/or nematicidal protein may contain TPs that are the same or different, and binary and/or tertiary peptides that are the same or different. In some embodiments, the C-terminal TP is fused or unfused at its C-terminus with a binary or tertiary peptide. In each of the exemplified embodiments above, the pest may be an insect or a nematode as described in the present disclosure. In various embodiments, the DNA construct can be a vector, for example, a cloning vector or an expression vector containing a coding sequence comprising a polynucleotide encoding an insecticidal and/or nematicidal protein of the present invention and one or more control sequences that permits the replication and/or expression of the coding sequence in a host cell, for example, a bacterial cell, a yeast cell or a plant cell. In some of the embodiments above, the binary and/or tertiary peptides of the present invention cannot be cleaved in a plant cell by an endogenous plant protease, or by a naturally occurring plant protease.

[0022] In a fourth aspect, the present invention provides a modified toxic peptide or protein (TP) that comprises a binary or tertiary peptide inserted (e.g. fused in frame) between the active and inactive portions of the toxic peptide. In one example, a binary or tertiary peptide is inserted between the cleavable pro inactive portion of the peptide and mature active portion of the peptide. In another example, a modified toxic protein (TP) includes a stabilizing domain fused in frame with a binary or tertiary peptide of the present invention which is fused in frame with the active portion of the toxic protein (TP). In another example, the modified toxic protein (TP) is a Bacillus thuringiensis or B. thuringiensis (“Bt”) derived protein, known herein as a “Bt protein” and “Bt peptide” which are used interchangeably and include peptides produced by Bt, collectively referred to herein as Bt toxic proteins or “Bt TPs”. Such peptides and proteins are frequently written as “cry”, “cyt” or “VIP” proteins encoded by the cry, cyt and vip genes. Bt TPs are more usually attributed to insecticidal crystal proteins encoded by the cry genes. Bt TPs are examples of PFIPS (Pore Forming Insecticidal Proteins). In various embodiments, a modified TP can include a Bt protein as described above and herein, in which the stabilizing domain (STA) is fused in frame with a binary or tertiary peptide or a construct containing one or two or more binary or tertiary peptides of the present invention. The binary or tertiary peptide is fused in frame with the active fragment of the Bt protein, such that upon exposure to the gut environment and/or hemolymph environment of an insect and/or nematode and in the gastrointestinal system of a human being, the binary or tertiary peptide is cleaved, thus separating the stabilizing or inactive portion of the TP from the active or mature form of the TP, rendering the cleaved active or mature portion insecticidal and/or nematicidal. In some embodiments, insecticidal and/or nematicidal proteins comprise a Bt TP and/or a modified Bt protein, one or more binary and/or tertiary peptides and one or more of an ERSP, and a STA as described above. In some exemplary embodiments as shown in FIG. 3B, a modified TP can include a Bt TP, for example, a cry, a cyt or a VIP protein, in which the TP_{inactive} is a Bt_{(inactive)} (the inactive portion of a Bt TP) and the TP_{active} is a Bt_{(active)} (the active portion of a Bt TP) are separated, and fused in frame with one or more binary and/or tertiary peptides designated as L as shown in FIG. 3B). Upon exposure to the gut environment and/or hemolymph environment of an insect and/or nematode and in the gastrointestinal system of an animal subject, for example a human subject, the binary or tertiary peptide is cleaved, thus separating the inactive portion of the TP from the active or mature portion of the TP, rendering the cleaved active or mature portion insecticidal and/or nematicidal in the insect and/or nematode. In some related embodiments, the modified TP as described above, for example, an exemplary Bt TP, may also optionally include an ERSP fused in frame to the N-terminal portion of the modified TP.

### BRIEF DESCRIPTION OF THE DRAWINGS

[0023] FIG. 1. Demonstration of the FRET molecules in FRET kit (Cat. No. PSREPLI005, Mimotopes) to detect the specificity of amino acid sequence based cleavage by human simulated gastrointestinal fluid (SGF) and insect gut digestive enzymes. This figure is borrowed from the Mimotopes FRET kit to illustrate how cleavage generates detectable fluorescence.

[0024] FIG. 2. Demonstration of first and second aspects that are exemplary embodiments of the invention. The first aspect is the graphical representation of a binary and/or tertiary cleavable linker peptide designated (L). The second aspect illustrates various combinations of L fused to a toxic peptide or protein (TP) (from 1-200 repeats).

[0025] FIG. 3A. Demonstration of addition of an optional stability domain or stability protein (STA), fused to L fused to TP. This figure demonstrates an illustrative usage of a STA positioned in the N terminal position and fused in frame to an L and a TP to form an illustrative STA-L-TP construct.

[0026] FIG. 3B depicts an embodiment in which a modified TP comprising a TP_{inactive} portion of the TP is fused in frame with a cleavable (L) peptide which is fused in frame to the TP_{active} portion of the TP. As illustrated in FIG. 3B, upon exposure to the animal and insect and/or nematode gut environment, the cleavable L peptide is cleaved, thus separating the TP_{inactive} portion and the TP_{active} portion, thus liberating the active portion of the TP in the insect and/or nematode. In various embodiments, the modified TP is a Bt TP as described herein.

[0027] FIG. 4. Demonstration of the Binary or Tertiary Cleavable Linking Peptide in an insecticidal and/or nematicidal protein with two or more TPs and an ERSP. This figure illustrates various embodiments from FIG. 2 with the addition of an N-terminal fusion of an ERSP.

[0028] FIG. 5. Demonstration of the Binary or Tertiary Cleavable Linking Peptides of an exemplary insecticidal and/or nematicidal protein with two or more TPs and an ERSP fused to the N-terminal of the STA. This figure illustrates various embodiments from FIG. 2, with the addition of a STA and an N-terminal fusion of an ERSP to that STA.

[0029] FIG. 6A depicts an illustrative insecticidal and/or nematicidal protein comprising a BAAS ERSP, fused in frame to ubiquitin which is fused to a U+2-ACTX-Hv1a TP which is fused to 3 L-TP fusion constructs (each repeating construct comprising a linking cleavable peptide L, wherein L is a tertiary cleavable linking peptide, having three regions (XYZ), and wherein the Z region is the dipeptide glycine-serine GS, and the TP is a U-ACTX-Hv1a) and where the last TP U-ACTX-Hv1a has a fused 10 His tag.

[0030] FIG. 6B depicts an illustrative insecticidal and/or nematicidal protein comprising a BAAS ERSP, fused in frame to a 3 repeating construct, the construct comprising a U-ACTX-Hv1a TP fused to a linker (L) which may be a binary or tertiary cleavable linking peptide. The last U-ACTX-Hv1a TP has a 10 His tag.

[0031] FIG. 6C depicts a graphical representation of an illustrative insecticidal and/or nematicidal protein shown in the form of a construct, wherein each depiction of the ERSP, STA, (TP-L)_{N} and TP are fused in frame. In this construct, ERSP is fused to the N-terminus of a STA domain, which is fused to a repeating construct, the construct comprises units of TP fused to a linker peptide (L), wherein each TP in the repeating construct may be the same or different and each L in the repeating construct may be the same or different. Finally, the last repeating unit of the TP-L construct is fused to the N-terminus of a TP. In this exemplary embodiment, N can be 1 to 10 repeating units, for example, 1, 2, 3, 4, 5, 6, 7, 8, 9, or 10 units, such that upon cleavage in an insect and/or nematode gut environment, each L is cleaved, thus releasing multiple copies of TP which is insecticidal and/or nematicidal to the insect or nematode that ingested the insecticidal and/or nematicidal protein.

[0032] FIG. 7. Demonstration of detection of cleavage of the tertiary linking peptides, ALKLFVGS (SEQ ID NO: 1660) and IFVRLRGS (SEQ ID NO: 1674), in all digestive enzyme conditions compared to the control peptide, IGER, which only cleaves in the CEW gut extract. This figure contains the three digestive enzyme conditions (rows) and three different proteins (columns) that each contain four TP units (U-ACTX-Hv1a) with intervening tertiary linking peptides or the control peptide, IGER. The cleavage reactions are stopped by the addition of denaturing conditions (chemical and heat) at the time points listed below each gel image. A His-tagged western blot detection illustrates the digestion and disappearance of the protein band for tertiary peptides ALKLFVGS (SEQ ID NO: 1660) and IFVRLRGS (SEQ ID NO:1674) in all digestive conditions, or the retention of the intact protein band across the time points for the control peptide IGER in both the SCR gut extract and SGF.

[0033] FIG. 8. An example of a stable corn transformation vector. This figure depicts one example of a stable corn transformation vector. The white arrows depict the basic backbone components of the vector. The black arrows depict the T-DNA portion of the vector which is transformed into the corn genome and results in the selection and regeneration of transgenic corn plants expressing the insecticidal protein containing cleavable linking peptides.

[0034] FIG. 9. An example of efficacy data of a field trial of corn plants expressing the open reading frame (ORF) comprising an exemplary insecticidal and/or nematicidal protein as described in FIG. 6A after transformation by a vector described in FIG. 8.

### DETAILED DESCRIPTION OF THE INVENTION

### Definitions

[0035] “ACTX” or “ACTX peptide” means a Family of insecticidal ICK TPs that have been isolated from an Australian funnel-web spider belonging to the Atracinae subfamily. One such spider is known as the Australian Blue Mountains Funnel-web Spider, which has the scientific name Hydronyche versuta. Three examples of ACTX peptides from this species are the Omega, Kappa, and U peptides.

[0036] “Agroinfection” means a plant transformation method where DNA is introduced into a plant cell by using Agrobacteria A. tumefaciens or A. rhizogenes.

[0037] “BAAS” means barley alpha-amylase signal peptide. It is an example of an ERSP.

[0038] “Binary vector” or “binary expression vector” means an expression vector which can replicate itself in both E. coli strains and Agrobacterium strains. Also, the vector contains a region of DNA (often referred to as t-DNA) bracketed by left and right border sequences that is recognized by virulence genes to be copied and delivered into a plant cell by Agrobacterium.

[0039] “Bt,” also known as Bacillus thuringiensis or B. thuringiensis, means a gram-positive soil bacterium that has been used worldwide for more than sixty years to control agricultural, forestry, and public health insect pests.

[0040] “Bt proteins” and “Bt peptides” are used interchangeably and include peptides produced by Bt are collectively referred to herein as Bt toxic proteins or “Bt TPs”. Such peptides are frequently written as “cry”, “cyt” or “VIP” proteins encoded by the cry, cyt and vip genes. Bt TPs are more usually attributed to insecticidal crystal proteins encoded by the cry genes. Bt TPs are examples of PFIPS (Pore Forming Insecticidal Proteins) see definition below. Examples of PFIPS and other Bt proteins are provided in the sequence listing.

[0041] “Chimeric gene” means a DNA sequence that encodes a gene derived from portions of one or more coding sequences to produce a new gene.

[0042] “Cleavable Linker” see Linker.

[0043] “Conditioned medium” means the cell culture medium which has been used by cells and is enriched with cell derived materials but does not contain cells.

[0044] “Conversion” or “converted” refers to the process of making an HP peptide.

[0045] “CRIP” and “CRIPS” are abbreviations for Cysteine Rich Insecticidal Protein and Proteins respectively. Cysteine rich insecticidal peptides (CRIPS) are peptides rich in cysteine which form disulfide bonds. CRIPS contain at least four (4) sometimes six (6) and sometimes eight (8) cysteine amino acids among proteins or peptides having at least 10 amino acids where the cysteines form two (2), three (3) or four (4) disulfide bonds. The disulfide bonds contribute to the folding, three-dimensional structure, and activity of the insecticidal peptide. The cysteine-cysteine disulfide bonds and the three dimensional structure they form play a significant role in the toxicity of these insecticidal peptides. A CRIP is exemplified by both inhibitory cysteine knot toxic proteins or ICK TPs (usually having 6-8 cysteines) and by examples of toxic peptides having disulfide bonds but that are not considered ICK TPs (Non-ICK CRIPS). Examples of an ICK would be an ACTX peptide from a spider and defined above. Representative example of ICK proteins include U-ACTX insecticidal peptides, Omega-ACTX insecticidal peptides and Kappa-ACTX insecticidal peptides. Examples of a Non-ICK CRIP would be a peptide like Av2 and Av3 which are toxic peptides first identified from sea anemones. These peptides are examples of a class of compounds that modulate sodium channels in the insect peripheral nervous system (PNS). Non-ICK CRIPS can have 4-8 cysteines which form 2-4 disulfide bonds. These cysteine-cysteine disulfide bonds stabilized toxic peptides (CRIPS) can have remarkable stability when exposed to the environment. Many CRIPS are isolated from venomous animals such as spiders, scorpions, snakes, sea snails and sea anemones and they are toxic to insects. Additional description is provided below.

[0046] “Defined medium” means a medium that is composed of known chemical components but does not contain crude proteinaceous extracts or by-products such as yeast extract or peptone.

[0047] “Disulfide bond” means a covalent bond between two cysteine amino acids derived by the coupling of two thiol groups on their side chains.

[0048] “Double transgene peptide expression vector” or “double transgene expression vector” means a yeast expression vector which contains two copies of the insecticidal peptide expression cassette.

[0049] “ELISA” or “iELISA” means a molecular biology protocol in which the samples are fixed to the surface of a plate and then detected as follows: a primary antibody is applied followed by a secondary antibody conjugated to an enzyme which converts a colorless substrate to colored substrate which can be detected and quantified across samples. During the protocol, antibodies are washed away such that only those that bind to their epitopes remain for detection. The samples, in our hands, are proteins isolated from plants, and ELISA allows for the quantification of the amount of expressed transgenic protein recovered.

[0050] “Expression ORF” means a nucleotide encoding a protein complex and is defined as the nucleotides in the ORF.

[0051] “ER” or “Endoplasmic reticulum” is a subcellular organelle common to all eukaryotes where some post translation modification processes occur.

[0052] “ERSP” or “Endoplasmic reticulum signal peptide” is an N-terminus sequence of amino acids that during protein translation of the mRNA molecule encoding an insecticidal and/or nematicidal protein is recognized and bound by a host cell signal-recognition particle, which moves the protein translation ribosome/mRNA complex to the ER in the cytoplasm. The result is the protein translation is paused until it docks with the ER where it continues and the resulting protein is injected into the ER.

[0053] “ersp” means a nucleotide encoding the peptide, ERSP.

[0054] “ER trafficking” means transportation of a cell expressed protein into ER for post-translational modification, sorting and transportation.

[0055] “FECT” means a transient plant expression system using Foxtail mosaic virus with elimination of coating protein gene and triple gene block.

[0056] “GFP” means a green fluorescent protein from the jellyfish Aequorea victoria. It is an example of a translational stabilizing protein.

[0057] “High Production peptide” or “HP peptide” means a peptide which is capable of being made, or is “converted,” according to the procedures described herein and which, once converted can be produced at increased yields, or higher rates of production, or in greater than normal amounts, in a biological system. The higher rates of production can be from 20 to 400% or greater than can be achieved with a peptide before conversion, using the same or similar production methods that were used to produce the peptide before conversion.

[0058] “Homology” when used in relation to nucleic acids refers to a degree of complementarity. There may be partial homology or complete homology (i.e., identity). “Sequence identity” refers to a measure of relatedness between two or more nucleic acids or proteins, and is given as a percentage with reference to the total comparison length. The identity calculation takes into account those nucleotide or amino acid residues that are identical and in the same relative positions in their respective larger sequences. Calculations of identity may be performed by algorithms contained within computer programs such as “GAP” (Genetics Computer Group, Madison, Wis.) and “ALIGN” (DNAStar, Madison, Wis.). A partially complementary sequence is one that at least partially inhibits (or competes with) a completely complementary sequence from hybridizing to a target nucleic acid is referred to using the functional term “substantially homologous.” The inhibition of hybridization of the completely complementary sequence to the target sequence may be examined using a hybridization assay (Southern or Northern blot, solution hybridization and the like) under conditions of low stringency. A substantially homologous sequence or probe will compete for and inhibit the binding (i.e., the hybridization) of a sequence which is completely homologous to a target under conditions of low stringency. This is not to say that conditions of low stringency are such that non-specific binding is permitted; low stringency conditions require that the binding of two sequences to one another be a specific (i.e., selective) interaction. The absence of non-specific binding may be tested by the use of a second target which lacks even a partial degree of complementarity (e.g., less than about 30% identity); in the absence of non-specific binding the probe will not hybridize to the second non-complementary target.

[0059] In preferred embodiments, hybridization conditions are based on the melting temperature (Tm) of the nucleic acid binding complex and confer a defined “stringency” The term “hybridization” refers to the pairing of complementary nucleic acids. Hybridization and the strength of hybridization (i.e., the strength of the association between the nucleic acids) is impacted by such factors as the degree of complementary between the nucleic acids, stringency of the conditions involved, the Tm of the formed hybrid, and the G:C ratio within the nucleic acids. A single molecule that contains pairing of complementary nucleic acids within its structure is said to be “self-hybridized.”

[0060] The term “Tm” refers to the “melting temperature” of a nucleic acid. The melting temperature is the temperature at which a population of double-stranded nucleic acid molecules becomes half dissociated into single strands. The equation for calculating the Tm of nucleic acids is well known in the art. As indicated by standard references, a simple estimate of the Tm value may be calculated by the equation: Tm=81.5+0.41(% G+C), when a nucleic acid is in aqueous solution at 1 M NaCl. The term “stringency” refers to the conditions of temperature, ionic strength, and the presence of other compounds such as organic solvents, under which nucleic acid hybridizations are conducted. With “high stringency” conditions, nucleic acid base pairing will occur only between nucleic acid fragments that have a high frequency of complementary base sequences. Thus, conditions of “low” stringency are often required with nucleic acids that are derived from organisms that are genetically diverse, as the frequency of complementary sequences is usually less.

[0061] “Low stringency conditions” when used in reference to nucleic acid hybridization comprise conditions equivalent to binding or hybridization at 42° C. in a solution consisting of 5×SSPE (43.8 g/l NaCl, 6.9 g/l NaH2PO4.H2O and 1.85 g/l EDTA, pH adjusted to 7.4 with NaOH), 0.1% SDS, 5×Denhardt's reagent [50×Denhardt's contains per 500 ml: 5 g Ficoll (Type 400, Pharmacia), 5 g BSA (Fraction V; Sigma)] and 100 μg/mL denatured salmon sperm DNA followed by washing in a solution comprising 5×SSPE, 0.1% SDS at 42° C. when a probe of about 500 nucleotides in length is employed.

[0062] “Medium stringency conditions” when used in reference to nucleic acid hybridization comprise conditions equivalent to binding or hybridization at 42° C. in a solution consisting of 5×SSPE (43.8 g/l NaCl, 6.9 g/l NaH2PO4.H2O and 1.85 g/l EDTA, pH adjusted to 7.4 with NaOH), 0.5% SDS, 5×Denhardt's reagent and 100 μg/mL denatured salmon sperm DNA followed by washing in a solution comprising 10×SSPE, 1.0% SDS at 42° C. when a probe of about 500 nucleotides in length is employed.

[0063] “High stringency conditions” when used in reference to nucleic acid hybridization comprise conditions equivalent to binding or hybridization at 42° C. in a solution consisting of 5.times.SSPE (43.8 g/l NaCl, 6.9 g/l NaH2PO4.H2O and 1.85 g/l EDTA, pH adjusted to 7.4 with NaOH), 0.5% SDS, 5×Denhardt's reagent and 100 μg/mL denatured salmon sperm DNA followed by washing in a solution comprising 0.1×SSPE, 1.0% SDS at 42° C. when a probe of about 500 nucleotides in length is employed.

[0064] It is well known that numerous equivalent conditions may be employed to comprise low stringency conditions; factors such as the length and nature (DNA, RNA, base composition) of the probe and nature of the target (DNA, RNA, base composition, present in solution or immobilized, etc.) and the concentration of the salts and other components (e.g., the presence or absence of formamide, dextran sulfate, polyethylene glycol) are considered and the hybridization solution may be varied to generate conditions of low stringency hybridization different from, but equivalent to, the above listed conditions. In addition, the art knows conditions that promote hybridization under conditions of high stringency (e.g., increasing the temperature of the hybridization and/or wash steps, the use of formamide in the hybridization solution, etc.).

[0065] “Hybrid peptide,” aka “Hybrid”, aka “hybrid toxin,” aka “hybrid-ACTX-Hv1a,” aka “native hybridACTX-Hv1a,” as well as “U peptide,” aka “U toxin,” aka “native U,” aka “U-ACTX-Hv1a,” aka “native U-ACTX-Hv1a,” all refer to an ACTX peptide, which was discovered from a spider known as the Australian Blue Mountains Funnel-web Spider, Hydronyche versuta, and is a dual antagonist to insect voltage-gated Ca2+ channels and voltage-gated K+ channels.

[0066] “IGER” means a name for a short peptide, based on its actual sequence of one letter codes. It is an example of a peptide that is only cleaved in insects.

[0067] “ICK motif,” “ICK motif protein,” “ICK polypeptides”, “ICK proteins”, “inhibitor cystine knot motif,” “Toxic insect ICK TPs,” “ICK motif TPs,” “CK” peptides,” “cystine knot motif,” or “cystine knot peptides” (all used interchangeably herein), means a 16 to 60 amino acid peptide with at least 6 half-cystine core amino acids having three disulfide bridges, wherein the 3 disulfide bridges are covalent bonds and of the six half-cystine residues the covalent disulfide bonds are between the first and fourth, the second and fifth, and the third and sixth half-cystines, of the six core half-cystine amino acids starting from the N-terminal amino acid. In general this type of peptide comprises a beta-hairpin secondary structure, normally composed of residues situated between the fourth and sixth core half-cystines of the motif, the hairpin being stabilized by the structural crosslinking provided by the motif s three disulfide bonds. Note that additional cysteine/cystine or half-cystine amino acids may be present within the inhibitor cystine knot motif.

[0068] Examples are provided in the sequence listing. Representative example of ICK proteins include U-ACTX insecticidal peptides, Omega-ACTX insecticidal peptides and Kappa-ACTX insecticidal peptides.

[0069] “ick” means a nucleotide encoding an ICK motif protein.

[0070] “ICK motif protein expression ORF” or “expression ORF” means a nucleotide encoding an ICK motif protein complex and is defined as the nucleotides in the ORF.

[0071] “ICK motif protein expression vector” or “ICK expression vector”, or “ICK motif expression vector,” means a binary vector which contains an expression ORF. The binary vector also contains the necessary transcription promoter and terminator sequence surrounding the expression ORF to promote expression of the ORF and the protein it encodes.

[0072] “Insect” includes all organisms in the class “Insecta”. The term “pre-adult” insects refers to any form of an organism prior to the adult stage, including, for example, eggs, larvae, and nymphs.

[0073] “Insect gut environment” or “gut environment” means the specific pH and protease conditions found within the fore, mid or hind gut of an insect or insect larva.

[0074] “Insect hemolymph environment” means the specific pH and protease conditions of found within an insect or insect larva.

[0075] As used herein, the term “insecticidal” is generally used to refer to the ability of a polypeptide or protein used herein, to increase mortality or inhibit growth rate of insects. As used herein, the term “nematicidal” refers to the ability of a polypeptide or protein used herein, to increase mortality or inhibit the growth rate of nematodes. In general, the term “nematode” comprises eggs, larvae, juvenile and mature forms of said organism.

[0076] “Insecticidal activity” means that on or after exposure of the insect to compounds or peptides, the insect either dies stops or slows its movement or its feeding, stops or slows its growth, fails to pupate, cannot reproduce or cannot produce fertile offspring.

[0077] “Insecticidal peptide” or “Insecticidal protein” or “toxic polypeptide” or “toxic protein” (used interchangeably herein) means a protein or polypeptide having insecticidal activity when ingested by, in contact with, or injected into an insect.

[0078] “Insecticidal peptide production strain screen” means a screening process that identifies the higher-yielding insecticidal peptide production yeast strains from the lower yielding strains. In the described methods herein, it refers to screens that use reverse-phase HPLC or the housefly injection bioassay.

[0079] “Integrative expression vector” or “integrative vector” means a yeast expression vector which can insert itself into a specific locus of the yeast cell genome and stably becomes a part of the yeast genome.

[0080] “Known peptide” means a peptide known to have biological activity and may be a mature peptide or any version or fragment thereof including pre and pro peptides and conjugates of active peptides. A preferred known peptide is one with insecticidal activity.

[0081] “L” in the proper context means a cleavable intervening binary or tertiary peptide. When referring to amino acids, “L” can also mean leucine.

[0082] “Linker, Cleavable Linker, or Peptide Linker” means a short peptide sequence (a binary or tertiary peptide) that is the target site of at least two types of proteases one of which is an insect and/or nematode protease and the other one of which is a human protease such that the linker can be separated by both types of protease that can cleave and separate the protein into two parts or a short DNA sequence that is placed in the reading frame in the ORF and encoding a short peptide sequence in the protein that is the target site of an insect and/or nematode and an animal (e.g. human) protease that can cleave and separate the protein into two parts.

[0083] “Lepidopteran gut environment” means the specific pH and protease conditions of found within the fore, mid or hind gut of a lepidopteran insect or larva.

[0084] “Lepidopteran hemolymph environment” means the specific pH and protease conditions of found within lepidopteran insect or larva.

[0085] “Multiple ICK motif protein domain” means a protein composed of multiple ICK motif TPs which are linked by multiple intervening linker peptides. The ICK motif TPs in the multiple ICK motif TP domain can be same or different, and the intervening linker peptides in this domain can also be the same or different.

[0086] “Nematicidal peptide” or “nematicidal protein” means a peptide or protein having nematicidal activity when ingested by, in contact with, or injected into a nematode and is used as an example of a toxic peptide and toxic protein.

[0087] “Nematicides” and “nematicidal” refers to the ability of a nematicidal peptide or nematicidal protein to increase mortality or inhibit the growth rate of nematodes. In general, the term “nematode” comprises eggs, larvae, juvenile and mature forms of said organism.

[0088] “Non-ICK CRIPS” can have 4-8 cysteines which form 2-4 disulfide bonds. Non-ICK TPs include cystine knot peptides that are not ICK TPs. Non-ICK TPs may have different connection orders of the cystine bonds than ICKs. Examples of a Non-ICK CRIP are peptides like Av2 and Av3 which are peptides first identified from sea anemones. These anemone peptides are examples of a class of compounds that modulate sodium channels in the insect peripheral nervous system (PNS).

[0089] “Non-Polar amino acid” is an amino acid that is weakly hydrophobic and includes glycine, alanine, proline, valine, leucine, isoleucine, phenylalanine and methionine. Glycine or gly is the most preferred non-polar amino acid for the dipeptides of this invention.

[0090] “Normalized peptide yield” means the peptide yield in the conditioned medium divided by the corresponding cell density at the point the peptide yield is measured. The peptide yield can be represented by the mass of the produced peptide in a unit of volume, for example, mg per liter or mg/L, or by the UV absorbance peak area of the produced peptide in the HPLC chromatograph, for example, mAu·sec. The cell density can be represented by visible light absorbance of the culture at wavelength of 600 nm (OD600).

[0091] “One letter code” means the peptide sequence which is listed in its one letter code to distinguish the various amino acids in the primary structure of a protein. alanine=A, arginine=R, asparagine=N, aspartic acid=D, asparagine or aspartic acid=B, cysteine=C, glutamic acid=E, glutamine=Q, glutamine or glutamic acid=Z, glycine=G, histidine=H, isoleucine=I, leucine=L, lysine=K, methionine=M, phenylalanine=F, proline=P, serine=S, threonine=T, tryptophan=W, tyrosine=Y, valine=V.

[0092] “Omega peptide” also referred to herein as “omega toxin,” which includes the example, “omega-ACTX-Hv1a,” aka “native omegaACTX-Hv1a,” all refer to a class of ACTX peptides which were first isolated from a spider known as the Australian Blue Mountains Funnel-web Spider, Hydronyche versuta, and which is an antagonist to the insect voltage-gated Ca2+ channel.

[0093] “ORF” or “Open reading frame” or “peptide expression ORF” means that DNA sequence encoding a protein which begins with an ATG start codon and ends with a TGA, TAA or TAG stop codon. ORF can also mean the translated protein that the DNA encodes.

[0094] “Operably linked” means that the two adjacent DNA sequences are placed together such that the transcriptional activation of one can act on the other.

[0095] “PEP” means Plant Expressed Peptide.

[0096] “Peptide expression cassette”, or “expression cassette” means a DNA sequence which is composed of all the DNA elements necessary to complete transcription of an insecticidal peptide in a biological expression system. In the described methods herein, it includes a transcription promoter, a DNA sequence to encode an α-mating factor signal sequence and a Kex 2 cleavage site, an insecticidal peptide transgene, a stop codon and a transcription terminator.

[0097] “Peptide expression vector” means a host organism expression vector which contains a heterologous insecticidal peptide transgene.

[0098] “Peptide expression yeast strain”, “peptide expression strain” or “peptide production strain” means a yeast strain which can produce a heterologous insecticidal peptide.

[0099] “Peptide made special” means a peptide previously having low peptide yield from a biological expression system that becomes an HP peptide because of the methods described herein used to increase its yield.

[0100] “Peptide Linker” see Linker.

[0101] “Peptide transgene” or “insecticidal peptide transgene” means a DNA sequence that encodes an insecticidal peptide and can be translated in a biological expression system.

[0102] “Peptide yield” means the insecticidal peptide concentration in the conditioned medium which is produced from the cells of a peptide expression yeast strain. It can be represented by the mass of the produced peptide in a unit of volume, for example, mg per liter or mg/L, or by the UV absorbance peak area of the produced peptide in the HPLC chromatograph, for example, mAu·sec.

[0103] “Peritrophic membrane” means a lining inside the insect gut that traps large food particles can aid in their movement through the gut while allowing digestion, but also protecting the gut wall.

[0104] “Pest” includes, but is not limited to: insects, fungi, bacteria, nematodes, mites, ticks, and the like.

[0105] “PFIP” means a protein that can form a pore or channel in the cells that line an insect gut, such as gut epithelium cells. Examples of PFIPS are Bt toxic peptides (Bt TPs) such as cry, crt and VIP other PFIP examples can be found in the sequence listing.

[0106] “Plant regeneration media” means any media that contains the necessary elements and vitamins for plant growth and plant hormones necessary to promote regeneration of a cell into an embryo which can germinate and generate a plantlet derived from tissue culture. Often the media contains a selectable agent to which the transgenic cells express a selection gene that confers resistance to the agent.

[0107] “Plant transgenic protein” means a protein from a heterologous species that is expressed in a plant after the DNA or RNA encoding it was delivered into one or more of the plant cells.

[0108] “Polar amino acid” is an amino acid that is polar and includes serine, threonine, cystine, cysteine, asparagine, glutamine, histidine, tryptophan and tyrosine; preferred polar amino acids are serine, threonine, cystine, cysteine, asparagine and glutamine; with serine being most highly preferred.

[0109] “Post-transcriptional gene silencing”, or “PTGS”, means a cellular process within living cells that suppress the expression of a gene.

[0110] “Protein” has the same meaning as “Peptide” in this document.

[0111] “Recombinant vector” means a DNA plasmid vector into which foreign DNA has been inserted.

[0112] “Selection gene” means a gene which confers an advantage for a genomically modified organism to grow under the selective pressure.

[0113] “Spacer” or “spacers” means a peptide comprising 1 to 4 amino acids that is fused in frame to either the N-terminus of a binary peptide, or to the C-terminus of the binary peptide, or both to the N-terminus and the C-terminus of a binary peptide as is disclosed herein, thus forming a tertiary peptide. Tertiary peptides differ from binary peptides in that they are like a binary peptide only with an additional region called a spacer comprising any 1 to 4 amino acids, more often 2 to 4 amino acids, sometimes 1, sometimes 2, sometimes 3 and sometimes 4 amino acids and is also sometimes called the “Z” region. In some specific embodiments, the spacer may be referred to as “+2” or “plus-2” which is in reference to the portion of the peptide that is a dipeptide comprising any two amino acid peptides as described herein, such as for example “GS.” In some embodiments, the so called tertiary peptides of the present invention have three regions, they are: the X and Y region and the third region is called either a “spacer” or “Z” region. In some embodiments, each of X and Y can be 2-4 amino acids in length, and Z can be an additional 1-4 amino acids in length per Z with 1 or 2 Z regions possible if one Z is before and one Z is after the binary peptide, thus allowing for a 16 amino acid linker.

[0114] “STA”, or “Translational stabilizing protein”, or “stabilizing domain”, or “stabilizing protein”, (used interchangeably herein) means a protein with sufficient tertiary structure that it can accumulate in a cell without being targeted by the cellular process of protein degradation. The protein can be between 5 and 50 amino acids (aa). In some embodiments used throughout the exemplary embodiments herein, a STA may include an ICK-motif protein), 50 to 250 aa (GNA), 250 to 750 aa (e.g., chitinase) and 750 to 1500 aa (e.g., enhancin). The translational stabilizing protein is coded by a DNA sequence for a protein that is fused in frame with a sequence encoding an insecticidal protein in the ORF. The fusion protein can either be upstream or downstream of the toxic protein and can have any intervening sequence between the two sequences as long as the intervening sequence does not result in a frame shift of either DNA sequence. The translational stabilizing protein can also have an activity which increases delivery of the ICK motif TP across the gut wall and into the hemolymph of the insect. Such a delivery can be achieved by actively trafficking the entire ORF across the gut wall, or by cleavage within the gut environment to separate the ICK motif TP while the translational stabilizing protein damages the peritrophic membrane and/or gut wall to increase diffusion of the ICK motif TP into the hemolymph.

[0115] “sta” means a nucleotide encoding a translational stabilizing protein.

[0116] “TMOF” “TMOF motif,” or “TMOF TPs” means “trypsin modulating oostatic factor” protein sequences. Examples are provided in the sequence listing. Numerous examples and variants are provided herein. SEQ ID NO: 708 is the wild type TMOF sequence. Other non-limiting variants are provided in SEQ ID NOs: 709-721. Other examples would be known or could be created by one skilled in the art.

[0117] “Toxic peptide” or “toxic protein” or “TP” (all used interchangeably) means a peptide or protein having insecticidal and/or nematicidal activity when ingested by, in contact with, or injected into an insect or nematode respectively. TPs of the present invention also include modified TPs, mutant TPs or derivative TPs. In some embodiments, a mutant or variant TP encompasses a TP that may have one or more conservative amino acid substitutions, that when combined, the conservative amino acid substitutions do not substantially diminish the insecticidal and/or nematicidal activity of the mutated TP in relation to its non-mutated TP, i.e. retains the insecticidal and/or nematicidal activity of at least 90%, or at least 80%, or at least 70%, or at least 60%, or at least 50%, or at least 40%, or at least 30% of the insecticidal and/or nematicidal activity of the non-mutated TP. TPs may also include peptides and proteins encoded by a polynucleotide having one or more point mutations, for example, 1, 2, 3, 4, 5, 6, 7, 8, 9, or 10 point mutations or more, such that when the mutated TP encoding polynucleotide is transcribed and/or translated, the expressed mutated TP peptide or protein retains insecticidal and/or nematicidal activity that is at least 90%, or at least 80%, or at least 70%, or at least 60%, or at least 50%, or at least 40%, or at least 30% of the insecticidal and/or nematicidal activity of the peptide or protein encoded by the corresponding non-mutated TP polynucleotide. TPs of the present invention may also include TP peptides and proteins that have at least 80%, or at least 85%, or at least 90%, or at least 95%, or at least 96% or at least 97% or at least 98% or at least 99% amino acid sequence identity to any TP disclosed in SEQ ID NO: 5-1593 and 1761-1775 and 1761-1775, and still retains at least at least 90%, or at least 80%, or at least 70%, or at least 60%, or at least 50%, or at least 40%, or at least 30% of the insecticidal and/or nematicidal activity of the corresponding TP set forth in SEQ ID NO: 5-1593 and 1761-1775. TPs of the present invention may also include TP peptides and proteins having 1-6 amino acid extensions fused in frame to the N-terminus or C-terminus or both termini of any TP having an amino acid sequence as set forth in SEQ ID NOs: 5-1593 and 1761-1775.

[0118] “TSP” or “total soluble protein” means the total amount of protein that can be extracted from a plant tissue sample and solubilized into the extraction buffer.

[0119] “Transgene” means a heterologous DNA sequence encoding a protein which is transformed into a plant.

[0120] “Transgenic host cell” means a cell which is transformed with a gene and has been selected for its transgenic status via an additional selection gene.

[0121] “Transgenic plant” means a plant that has been derived from a single cell that was transformed with foreign DNA such that every cell in the plant contains that transgene.

[0122] “Transient expression system” means an Agrobacterium tumefaciens-based system which delivers DNA encoding a disarmed plant virus into a plant cell where it is expressed. The plant virus has been engineered to express a protein of interest at high concentrations, up to 40% of the TSP. In the technical proof, there are two transient expression systems used, a TRBO and a FECT system and the plant cells are leaf tissue of a tobacco plant “Nicotiana benthamiana.”

[0123] “TRBO” means a transient plant expression system using Tobacco mosaic virus with removal of the viral coating protein gene.

[0124] “Trypsin cleavage” means an in vitro assay that uses the protease enzyme trypsin (which recognizes exposed lysine and arginine amino acid residues) to separate a cleavable linker at that cleavage site. It also means the act of the trypsin enzyme cleaving that site.

[0125] “U-ACTX peptide,” or a “U protein” or a “U toxin,” which may include examples of “native U,” or “U-ACTX-Hv1a,” or “native U-ACTX-Hv1a,” which includes the representative example, “Hybrid peptide,” aka “hybrid toxin,” aka “hybrid-ACTX-Hv1a,” aka “native hybridACTX-Hv1a,” all refer to a native protein or native toxin, that can be found in nature or is otherwise known as examples of U-ACTX peptides, which in the case of “U-ACTX-Hv1a,” aka “native U-ACTX-Hv1a,” is a native spider toxin, that was first discovered from a spider with origins in the Australian Blue Mountains and is dual antagonist against insect voltage gated Ca2+ channels and K+ channels. The spider from which the toxin was discovered is known as the Australian Blue Mountains Funnel-web Spider, which has the scientific name Hydronyche versuta.

[0126] “U+2 peptide,” “U+2 protein”, “U+2 toxin,” or “U+2,” or “U+2-ACTX-Hv1a,” all refer to either a toxin, which has an additional dipeptide operatively linked to the native peptide, and may refer to the spider toxin which is sometimes called the U peptide and other names noted above. The additional dipeptide that is operatively linked to the U peptide and thus indicated as “+2” or “plus 2” can be selected among several peptides, any of which may result in a “U+2 peptide” with unique properties as discussed herein. These are also sometimes called “high production peptides.” When the term “U+2-ACTX-Hv1a” is used, it refers to a specific high production toxic peptide, comprising a naturally occurring peptide from the Australian Blue Mountains Funnel-web Spider, which has the scientific name Hydronyche versuta.

[0127] “VIP” proteins were discovered from screening the supernatant of vegetatively grown strains of Bt for possible insecticidal activity. They have little or no similarity to cry proteins and they were named Vegetative Insecticidal Proteins or VIP. Of particular use and preference for use with this document are what have been called VIP3, Vip3 proteins or Vip toxins which have Lepidopteran activity. They are thought to have a similar mode of action as Bt cry peptides. In this document VIP proteins are categorized as a PFIP type of protein.

[0128] “Yeast expression vector,” or “expression vector”, or “vector,” means a plasmid which can introduce a heterologous gene and/or expression cassette into yeast cells to be transcribed and translated.

[0129] “Yield” refers to the production of a peptide, and increased yields can mean increased amounts of production, increased rates of production, and an increased average or median yield and increased frequency at higher yields.

[0130] (1). Cleavable Linking Groups for Insecticidal and/or Nematicidal Proteins

[0131] The present invention provides binary and tertiary peptides that are operable to be cleaved in the insect, or nematode gut or hemolymph environment and in an animal gastrointestinal system, for example, a human, gastrointestinal system. The present invention therefore provides cleavable binary and tertiary peptides that when linked to other components of a larger insecticidal or nematicidal protein, may be cleaved by certain proteases and peptidases found in the human, insect and nematode gut environments. Advantageously, multiple copies of insecticidal and nematicidal peptides can be joined or linked, each copy being separated by one or more binary or tertiary peptides, that upon ingestion or contact with the insect and/or nematode peptidase or protease in the gut environment, the binary or tertiary peptides are cleaved releasing the active forms of the linked insecticidal and nematicidal peptides (See for example FIG. 2, second aspect) In these illustrative embodiments, N as shown in FIG. 2 second aspect, can be any integer ranging from 1 to 200, or for example, 1 to 100, or preferably from 1 to 10 and any integer therebetween. In various embodiments of the present invention, the binary and/or tertiary peptides may be linked to 1 or as many as 200 toxic peptides (i.e. insecticidal and/or nematicidal peptides), and any number there between, for example, 1 to 100, or more preferably 1 to 10, thus forming an insecticidal and/or nematicidal transgenic protein, that upon exposure to the insect, nematode or human gastric gut environment will cleave at specific substrate sequences in the binary and/or tertiary peptides, thereby liberating a plurality of toxic peptides from a polymer insecticidal and/or nematicidal protein structure. In various embodiments, polynucleotides encoding insecticidal and/or nematicidal transgenic proteins can be used to transform plant cells. In some embodiments, the insecticidal and/or nematicidal transgenic proteins may be formulated into compositions that can be sprayed or otherwise applied in any manner known to those skilled in the art to the surface of plants or parts thereof. Accordingly, DNA constructs are provided herein, operable to encode one or more insecticidal and/or nematicidal transgenic proteins under the appropriate conditions in a host cell, for example, a plant cell. Methods for controlling a pest infection by a parasitic insect, or a parasitic nematode of a plant cell comprises administering or introducing a polynucleotide encoding an insecticidal and/or nematicidal transgenic protein as described herein to a plant, plant tissue, or a plant cell by recombinant techniques and growing said recombinantly altered plant, plant tissue or plant cell in a field exposed to the pest. Alternatively, the insecticidal and/or nematicidal transgenic protein can be formulated into a sprayable composition and applied directly to susceptible plants by direct application, such that upon ingestion of the insecticidal and/or nematicidal transgenic protein by the infectious insect and/or nematode, one or more copies or monomers of the insecticidal and nematicidal peptide is cleaved from the insecticidal and/or nematicidal protein ingested by the infectious insect and/or nematode and produces its effect to destroy the insect and/or nematode.

[0132] (1A). Cleavable Binary and Tertiary Linking Peptides

[0133] In various embodiments, the present invention provides cleavable binary and tertiary linking peptides that are cleaved in the presence of an animal, insect and nematode protease or peptidase found in the gastrointestinal system of an animal, for example, a human, an insect and/or a nematode. As used herein, the terms gastrointestinal and gut environment are used interchangeably, and is meant to include its common meaning, i.e. the location where ingested food items are proteolytically degraded. In the human model, the gastrointestinal environment that is capable of breaking down peptides and proteins can include the mouth, stomach and small intestine.

[0134] Some of the available proteases and peptidases found in insect and nematode gut environment are dependent on the life-stage of the insect as these enzymes are often spatially and temporally expressed. The digestive system of the insect is composed of the alimentary canal and associated glands. Food enters the mouth and is mixed with secretions that may or may not contain digestive proteases and peptidases. The foregut and the hind gut are ectodermal in origin. The foregut serves generally as a storage depot for raw food. From the foregut discrete packages of food pass into the midgut (mesenteron or ventriculus). The midgut is the site of digestion and absorption of food nutrients. Generally, the presence of certain proteases and peptidases in the midgut follow the pH of the gut. Certain proteases and peptidases in the human gastrointestinal system may include: pepsin, trypsin, chymotrypsin, elastase, carboxypeptidase, aminopeptidase, and dipeptidase. Insect and nematode gut environment, include the regions of the digestive system in the herbivore species where peptides and proteins are degraded during digestion. Some of the available proteases and peptidases found in insect and nematode gut environments may include: (1) serine proteases; (2) cysteine proteases; (3) aspartic proteases, and (4) metalloproteases.

[0135] The two predominant protease classes in the digestive systems of phytophagous insects are the serine and cysteine proteases. Murdock et al. (1987) carried out an elaborate study of the midgut enzymes of various pests belonging to Coleoptera, while Srinivasan et al. (2008) have reported on the midgut enzymes of various pests belonging to Lepidoptera. Serine proteases are known to dominate the larval gut environment and contribute to about 95% of the total digestive activity in Lepidoptera, whereas the Coleopteran species have a wider range of dominant gut proteases, including cysteine proteases. The papain family contains peptidases with a wide variety of activities, including endopeptidases with broad specificity (such as papain), endopeptidases with very narrow specificity (such as glycyl endopeptidases), aminopeptidases, dipeptidyl-peptidase, and peptidases with both endopeptidase and exopeptidase activities (such as cathepsins B and H). Other exemplary proteinases found in the midgut of various insects include trypsin-like enzymes, e.g. trypsin and chymotrypsin, pepsin, carboxypeptidase-B and aminotripeptidases.

[0136] Serine proteases are widely distributed in nearly all animals and microorganisms (Joanitti et al., 2006). In higher organisms, nearly 2% of genes code for these enzymes (Barrette-Ng et al., 2003). Being essentially indispensable to the maintenance and survival of their host organism, serine proteases play key roles in many biological processes. Serine proteases are classically categorized by their substrate specificity, notably by whether the residue at P1: trypsin-like (Lys/Arg preferred at P1), chymotrypsin-like (large hydrophobic residues such as Phe/Tyr/Leu at P1), or elastase-like (small hydrophobic residues such as Ala/Val at P1) (revised by Tyndall et. al., 2005). Serine proteases are a class of proteolytic enzymes whose central catalytic machinery is composed of three invariant residues, an aspartic acid, a histidine and a uniquely reactive serine, the latter giving rise to their name, the “catalytic triad”. The Asp-His-Ser triad can be found in at least four different structural contexts (Hedstrom, 2002). These four clans of serine proteases are typified by chymotrypsin, subtilisin, carboxypeptidase Y, and Clp protease. The three serine proteases of the chymotrypsin-like clan that have been studied in greatest detail are chymotrypsin, trypsin, and elastase. More recently, serine proteases with novel catalytic triads and dyads have been discovered for their roles in digestion, including Ser-His-Glu, Ser-Lys/His, His-Ser-His, and N-terminal Ser.

[0137] All major types of peptidases have been described in nematodes. Aspartic peptidases have been described primarily in functions related to the digestion of nutrients. In invertebrates it is thought that, along with the cysteine peptidases, these have the same role as aspartic and serine peptidases in vertebrates. In parasitic nematodes, the cysteine peptidases cover virtually all functions in which peptidases are involved in parasitic nematodes. Accordingly, Cathepsins B and L are types of cysteine peptidases belonging to the papain family, and have been comprehensively studied in nematodes. High variability has been found among the cathepsins B from different species of nematodes regarding optimum temperature and pH, and substrate affinity. It is thought that their main role is to digest nutrients and that the high interspecific variability observed is due to the nematode adapting to the ecological niche it occupies. Cathepsins L also seem to be involved in the digestion of nutrients.

[0138] One class of well-studied digestive enzymes found in the gut environment of insects and nematodes is the class of cysteine proteases. The term “cysteine protease” is intended to describe a protease that possesses a highly reactive thiol group of a cysteine residue at the catalytic site of the enzyme. There is evidence that many phytophagous insects and plant parasitic nematodes rely, at least in part, on midgut cysteine proteases for protein digestion. These include but are not limited to Hemiptera, especially squash bugs (Anasa tristis); green stink bug (Acrosternum hilare); Riptortus clavatus; and almost all Coleoptera examined to date, especially, Colorado potato beetle (Leptinotarsa deaemlineata); three-lined potato beetle (Lema trilineata); asparagus beetle (Crioceris asparagi); Mexican bean beetle (Epilachna varivestis); red flour beetle (Triolium castaneum); confused flour beetle (Tribolium confusum); the flea beetles (Chaetocnema spp., Haltica spp., and Epitrix spp.); corn rootworm (Diabrotica Spp.); cowpea weevil (Callosobruchus aculatue); boll weevil (Antonomus grandis); rice weevil (Sitophilus oryza); maize weevil (Sitophilus zeamais); granary weevil (Sitophilus granarius); Egyptian alfalfa weevil (Hypera postica); bean weevil (Acanthoseelides obtectus); lesser grain borer (Rhyzopertha dominica); yellow meal worm (Tenebrio molitor); Thysanoptera, especially, western flower thrips (Franklini ella occidentalis); Diptera, especially, leafminer spp. (Liriomyza trifolii); plant parasitic nematodes especially the potato cyst nematodes (Globodera spp.), the beet cyst nematode (Heterodera schachtii) and root knot nematodes (Meloidogyne spp.).

[0139] Another class of digestive enzymes is the aspartic proteases. The term “aspartic protease” is intended to describe a protease that possesses two highly reactive aspartic acid residues at the catalytic site of the enzyme and which is most often characterized by its specific inhibition with pepstatin, a low molecular weight inhibitor of nearly all known aspartic proteases. There is evidence that many phytophagous insects rely, in part, on midgut aspartic proteases for protein digestion most often in conjunction with cysteine proteases. These include but are not limited to Hemiptera especially (Rhodnius prolixus) and bedbug (Cimex spp.) and members of the families Phymatidae, Pentatomidae, Lygaeidae and Belostomatidae; Coleoptera, in the families of the Meloidae, Chrysomelidae, Coccinelidae and Bruchidae all belonging to the series Cucujiformia, especially, Colorado potato beetle (Leptinotarsa decemlineata) three-lined potato beetle (Lematri lineata); southern and western corn rootworm (Diabrotica undecimpunctata and D. virgifera), boll weevil (Anthonomus grandis), squash bug (Anasatristis); flea beetle (Phyllotreta crucifera), bruchid beetle (Callosobruchus maculatus), mexican bean beetle (Epilachna varivestis), soybean leafminer (Odontota horni), margined blister beetle (Epicauta pestifera) and the red flour beetle (Triolium castaneum); Diptera, especially housefly (Musca domestica) (Terra and Ferreira (1994) Comn. Biochem. Physiol. 109B: 1-62; Wolfson and Murdock (1990) J. Chem. Ecol. 16: 1089-1102).

[0140] In various embodiments, the present invention provides binary and tertiary peptides that act as substrates for human, insect and nematode proteinases, proteases and peptidases (collectively referred to herein as “proteases”) as described above. In various embodiments, binary peptides and tertiary peptides contain at least 4 amino acids and up to a maximum of 16 amino acids comprised of 2 or 3 different regions. Accordingly, binary peptides have two different regions and tertiary peptides have three different regions. In various embodiments, the binary peptides and the tertiary peptides of the present invention are all cleavable by a human protease within one region and an insect and/or nematode protease in the second region. Tertiary peptides differ from binary peptides in that they have an additional region called a spacer comprising 1 to 4 amino acids. In some embodiments, the spacer can be a “+2” or “plus-2” dipeptide comprising any two amino acids as described herein.

[0141] As used herein, simply for describing the different permutations and combinations of amino acids that can form the binary and tertiary peptides, for illustrative purposes only, the first region of the binary and tertiary peptide is named “X” and “X” is a substrate for an insect and/or a nematode protease, and the second region of the binary and tertiary peptide is called “Y”, which is a substrate for an animal for example, a human protease, for example, a human protease found in the human gastrointestinal system. In some embodiments, the tertiary peptides of the present invention have an X and Y region and the third region is called a spacer or “Z” region. In some embodiments, each of X and Y can be 2-4 amino acids in length, and Z can be 1-4 amino acids in length. In some embodiments, the binary and/or tertiary cleavable peptides cannot be cleaved by a plant protease, especially when the insecticidal and/or nematicidal protein is expressed in a plant, or part thereof. In these embodiments, the insecticidal and/or nematicidal protein expressed by the plant cannot be cleaved by a plant protease in situ, but can be cleaved by a human or insect or nematode gut protease when the plant or part thereof expressing the insecticidal and/or nematicidal protein is ingested by the human or insect or nematode.

[0142] (1B). Descriptions and Examples of Binary Peptides

[0143] Accordingly, the binary peptide can comprise or consist of X(₂₋₄)Y(₂₋₄), or Y(₂₋₄)X(₂₋₄), and an exemplary tertiary peptide can comprise X(₂₋₄)Y(₂₋₄)Z(₁₋₄), or Z(₁₋₄) X(₂₋₄)Y(₂₋₄), or Y(₂₋₄)X(₂₋₄)Z(₁₋₄), or Z(₁₋₄)Y(₂₋₄)X(₂₋₄), or Z(₁₋₄)X(₂₋₄)Y(₂₋₄)Z(₁₋₄), or Z(₁₋₄)Y(₂₋₄)X(₂₋₄)Z(₁₋₄), wherein each number in the parenthesis denotes the number of amino acids for that region. For example X(₂₋₄) denotes an X region with two to four amino acids, for example, X₁X₂ (two amino acids) or X₁X₂X₃ (three amino acids) or X₁X₂X₃X₄ (four amino acids). For example, a binary peptide can include the amino acid sequence: X₁-X₂-Y₁-Y₂, X₁-X₂-X₃-Y₁-Y₂, X₁-X₂-X₃-X₄-Y₁-Y₂, X₁-X₂-Y₁-Y₂-Y₃, X₁-X₂-X₃-Y₁-Y₂-Y₃, X₁-X₂-X₃-X₄-Y₁-Y₂-Y₃, X₁-X₂-Y₁-Y₂-Y₃-Y₄, X₁-X₂-X₃-Y₁-Y₂-Y₃-Y₄, X₁-X₂-X₃-X₄-Y₁-Y₂-Y₃-Y₄, Y₁-Y₂-X₁-X₂, Y₁-Y₂-X₁-X₂-X₃, Y₁-Y₂-X₁-X₂-X₃-X₄, Y₁-Y₂-Y₃-X₁-X₂, Y₁-Y₂-Y₃-X₁-X₂-X₃, Y₁-Y₂-Y₃-X₁-X₂-X₃-X₄, Y₁-Y₂-Y₃-Y₄-X₁-X₂, Y₁-Y₂-Y₃-Y₄-X₁-X₂-X₃, Y₁-Y₂-Y₃-Y₄-X₁-X₂-X₃-X₄, wherein each Xₙ and each Yₙ is an amino acid, and wherein X₁ is selected from the group consisting of: (all single letter amino acid format) A, D, E, G, I, K, L, N, P, Q, R, and V; X₂ is selected from the group consisting of A, F, G, I, K, L, N, P, Q, R, S, T, V, and Y; X₃ is selected from the group consisting of A, D, E, F, G, I, K, L, N, Q, R, S, T, V, and Y; X₄ is selected from the group consisting of: R, H, K, D, E, S, T, N, Q, G, A, I, L, M, F, W, Y, and V. In some embodiments, Y₁ is selected from the group consisting of: (all single letter amino acid format) A, D, E, F, G, I, L, N, Q, S, T, V, and Y; Y₂ is selected from the group consisting of F, G, I, L, and Y; and Y₃ is selected from the group consisting of A, D, E, F, G, I, K, L, R, S, T, V, and Y; and Y₄ is selected from the group consisting of: R, H, K, D, E, S, T, N, Q, G, A, I, L, M, F, W, Y, and V.

[0144] In various embodiments, exemplary X region peptide sequences, i.e., peptide sequences that may be cleaved by one or more insect and/or nematode proteases found in the insect and/or nematode gut/hemolymph environment may include: AAG, AAK, AAR, AFG, AFK, AFR, AGF, AGI, AGK, AGL, AGN, AGQ, AGR, AGS, AGT, AGY, AIG, AIK, AIN, AIQ, AIR, AKF, AKG, AKI, AKK, AKL, AKN, AKQ, AKR, AKS, AKT, AKY, ALG, ALK, ALN, ALQ, ALR, APF, APG, APK, APR, ARF, ARG, ARI, ARK, ARL, ARN, ARQ, ARR, ARS, ART, ARY, ASG, ASK, ASR, ATG, ATK, ATR, AVG, AVK, AVR, AYG, AYK, AYR, DGK, DGR, DIG, DIK, DIR, DLG, DLK, DLR, EGK, EGR, EIG, EIK, EIR, ELG, ELK, ELR, ER, FVR, GAF, GAI, GAK, GAL, GAR, GAY, GFK, GFR, GIK, GIN, GIQ, GIR, GKA, GKD, GKE, GKF, GKI, GKK, GKL, GKN, GKQ, GKR, GKS, GKT, GKV, GKY, GLK, GLN, GLQ, GLR, GNA, GNK, GNR, GNV, GPK, GPR, GQA, GQK, GQR, GQV, GRA, GRD, GRE, GRF, GRI, GRK, GRL, GRN, GRQ, GRR, GRS, GRT, GRV, GRY, GSI, GSK, GSL, GSR, GTI, GTK, GTL, GTR, GVF, GVI, GVK, GVL, GVR, GVY, GYK, GYR, IGA, IGF, IGI, IGK, IGL, IGN, IGQ, IGR, IGS, IGT, IGV, IGY, IIG, IIK, IIR, IKA, IKF, IKG, IKI, IKK, IKL, IKN, IKQ, IKR, IKS, IKT, IKV, IKY, ILG, ILK, ILR, INA, ING, INK, INR, INV, IPG, IPK, IPR, IQA, IQG, IQK, IQR, IQV, IRA, IRF, IRG, IRI, IRK, IRL, IRN, IRQ, IRR, IRS, IRT, IRV, IRY, ISG, ISK, ISR, ITG, ITK, ITR, KAF, KAG, KAI, KAK, KAL, KAR, KAY, KFF, KFG, KFK, KFR, KGA, KGD, KGE, KGF, KGI, KGK, KGL, KGN, KGQ, KGR, KGS, KGT, KGV, KGY, KIG, KIK, KIN, KIQ, KIR, KKA, KKD, KKE, KKF, KKG, KKN, KKQ, KKS, KKT, KKV, KKY, KLG, KLK, KLN, KLQ, KLR, KNG, KNK, KNR, KPG, KPK, KPR, KQG, KQK, KQR, KRA, KRD, KRE, KRF, KRG, KRN, KRQ, KRS, KRT, KRV, KRY, KSG, KSI, KSK, KSL, KSR, KTG, KTI, KTK, KTL, KTR, KVF, KVG, KVI, KVK, KVL, KVR, KVY, KYG, KYK, KYR, LFR, LGA, LGF, LGI, LGK, LGL, LGN, LGQ, LGR, LGS, LGT, LGV, LGY, LIG, LIK, LIR, LK, LKA, LKF, LKG, LKI, LKK, LKL, LKN, LKQ, LKR, LKS, LKT, LKV, LKY, LLG, LLK, LLR, LNA, LNG, LNK, LNR, LNV, LPG, LPK, LPR, LQA, LQG, LQK, LQR, LQV, LRA, LRF, LRG, LRI, LRK, LRL, LRN, LRQ, LRR, LRS, LRT, LRV, LRY, LSG, LSK, LSR, LTG, LTK, LTR, NGK, NGR, NIG, NIK, NIR, NLG, NLK, NLR, PGK, PGR, PIG, PIK, PIR, PKG, PKK, PKR, PLG, PLK, PLR, PRG, PRK, PRR, QGK, QGR, QIG, QIK, QIR, QLG, QLK, QLR, RAF, RAG, RAI, RAK, RAL, RAR, RAY, RFF, RFG, RFK, RFR, RGA, RGD, RGE, RGF, RGI, RGK, RGL, RGN, RGQ, RGR, RGS, RGT, RGV, RGY, RIG, RIK, RIN, RIQ, RIR, RKA, RKD, RKE, RKF, RKG, RKK, RKN, RKQ, RKS, RKT, RKV, RKY, RLF, RLFL, RLG, RLK, RLN, RLQ, RLR, RNG, RNK, RNR, RPG, RPK, RPR, RQG, RQK, RQR, RRA, RRD, RRE, RRF, RRG, RRK, RRN, RRQ, RRR, RRS, RRT, RRV, RRY, RSG, RSI, RSK, RSL, RSR, RTG, RTI, RTK, RTL, RTR, RVF, RVG, RVI, RVK, RVL, RVR, RVY, RYG, RYK, RYR, VAG, VAK, VAR, VFG, VFK, VFR, VGF, VGI, VGK, VGL, VGN, VGQ, VGR, VGS, VGT, VGY, VIG, VIK, VIN, VIQ, VIR, VKF, VKG, VKI, VKK, VKL, VKN, VKQ, VKR, VKS, VKT, VKY, VLG, VLK, VLN, VLQ, VLR, VPG, VPK, VPR, VR, VRF, VRG, VRI, VRK, VRL, VRN, VRQ, VRR, VRS, VRT, VRY, VSG, VSK, VSR, VTG, VTK, VTR, VVG, VVK, VVR, VYG, VYK, or VYR.

[0145] In various embodiments, exemplary X region peptide sequences, i.e., peptide sequences that may be cleaved by one or more insect and/or nematode proteases found in the insect and/or nematode gut/hemolymph environment may include: AAK, AAR, AFK, AFR, AIK, AIN, AIQ, AIR, AKF, AKI, AKK, AKL, AKN, AKQ, AKR, AKS, AKT, AKY, ALK, ALN, ALQ, ALR, APK, APR, ARF, ARI, ARK, ARL, ARN, ARQ, ARR, ARS, ART, ARY, ASK, ASR, ATK, ATR, AVK, AVR, AYK, AYR, DIK, DIR, DLK, DLR, EIK, EIR, ELK, ELR, IIK, IIR, IKA, IKF, IKI, IKK, IKL, IKN, IKQ, IKR, IKS, IKT, IKV, IKY, ILK, ILR, INA, INK, INR, INV, IPK, IPR, IQA, IQK, IQR, IQV, IRA, IRF, IRI, IRK, IRL, IRN, IRQ, IRR, IRS, IRT, IRV, IRY, ISK, ISR, ITK, ITR, KAF, KAI, KAK, KAL, KAR, KAY, KFK, KFR, KIK, KIN, KIQ, KIR, KKA, KKD, KKE, KKF, KKN, KKQ, KKS, KKT, KKV, KKY, KLK, KLN, KLQ, KLR, KNK, KNR, KPK, KPR, KQK, KQR, KRA, KRD, KRE, KRF, KRN, KRQ, KRS, KRT, KRV, KRY, KSI, KSK, KSL, KSR, KTI, KTK, KTL, KTR, KVF, KVI, KVK, KVL, KVR, KVY, KYK, KYR, LIK, LIR, LKA, LKF, LKI, LKK, LKL, LKN, LKQ, LKR, LKS, LKT, LKV, LKY, LLK, LLR, LNA, LNK, LNR, LNV, LPK, LPR, LQA, LQK, LQR, LQV, LRA, LRF, LRI, LRK, LRL, LRN, LRQ, LRR, LRS, LRT, LRV, LRY, LSK, LSR, LTK, LTR, NIK, NIR, NLK, NLR, PIK, PIR, PKK, PKR, PLK, PLR, PRK, PRR, QIK, QIR, QLK, QLR, RAF, RAI, RAK, RAL, RAR, RAY, RFK, RFR, RIK, RIN, RIQ, RIR, RKA, RKD, RKE, RKF, RKN, RKQ, RKS, RKT, RKV, RKY, RLK, RLN, RLQ, RLR, RNK, RNR, RPK, RPR, RQK, RQR, RRA, RRD, RRE, RRF, RRN, RRQ, RRS, RRT, RRV, RRY, RSI, RSK, RSL, RSR, RTI, RTK, RTL, RTR, RVF, RVI, RVK, RVL, RVR, RVY, RYK, RYR, VAK, VAR, VFK, VFR, VIK, VIN, VIQ, VIR, VKF, VKI, VKK, VKL, VKN, VKQ, VKR, VKS, VKT, VKY, VLK, VLN, VLQ, VLR, VPK, VPR, VRF, VRI, VRK, VRL, VRN, VRQ, VRR, VRS, VRT, VRY, VSK, VSR, VTK, VTR, VVK, VVR, VYK, or VYR.

[0146] In various embodiments, exemplary Y region peptide sequences, i.e., peptide sequences that may be cleaved by one or more animal, for example human proteases found in the animal, for example, a human gastrointestinal environment may include: AFF, AFG, AFI, AFL, AFV, AFY, AGF, AGL, AIF, AIL, ALF, ALG, ALI, ALL, ALY, AYF, AYL, DFF, DFG, DFI, DFL, DFY, DGF, DGL, DIF, DLF, DLG, DLY, DYF, DYL, EFF, EFG, EFI, EFL, EFY, EGF, EGL, EIF, ELF, ELG, ELY, EYF, EYL, FF, FFA, FFD, FFE, FFF, FFG, FFI, FFK, FFL, FFR, FFS, FFT, FFV, FFY, FGA, FGD, FGE, FGF, FGI, FGK, FGL, FGR, FGS, FGT, FGV, FGY, FLV, FLR, FYA, FYD, FYE, FYF, FYG, FYI, FYK, FYL, FYR, FYS, FYT, FYV, FYY, GFA, GFD, GFE, GFF, GFI, GFK, GFL, GFR, GFS, GFT, GFV, GFY, GGL, GIF, GIL, GLF, GLI, GLL, GLY, GYF, GYL, IF, IFA, IFF, IFG, IFI, IFL, IFV, IFY, IGF, IGL, IIF, IIL, ILF, ILG, ILI, ILL, ILY, IYF, IYL, LFA, LFF, LFG, LFI, LFL, LFV, LFY, LG, LGA, LGE, LGF, LGI, LGL, LGV, LGY, LIF, LIG, LII, LIL, LIY, LLF, LLG, LLI, LLL, LLY, LYA, LYF, LYG, LYI, LYL, LYV, LYY, NFF, NFG, NFI, NFL, NFY, NGF, NGL, NIL, NLG, NLI, NLL, NYF, NYL, QFF, QFG, QFI, QFL, QFY, QGF, QGL, QIL, QLG, QLI, QLL, QYF, QYL, SFF, SFG, SFI, SFL, SFY, SGF, SGL, SIF, SIL, SLF, SLG, SLI, SLL, SLY, SYF, SYL, TFF, TFG, TFI, TFL, TFY, TGF, TGL, TIF, TIL, TLF, TLG, TLI, TLL, TLY, TYF, TYL, VFF, VFG, VFI, VFL, VFY, VGF, VGL, VIF, VIL, VLF, VLG, VLI, VLL, VLY, VYF, VYL, YFA, YFD, YFE, YFF, YFG, YFI, YFK, YFL, YFR, YFS, YFT, YFV, YFY, YGF, YGL, YYF, or YYL.

[0147] In various embodiments, exemplary Y region peptide sequences, i.e., peptide sequences that may be cleaved by one or more animal, for example a human protease found in the animal, for example, a human gastrointestinal environment may include: AFF, AFI, AFL, AFY, AIF, AIL, ALF, ALI, ALL, ALY, AYF, AYL, DFF, DFI, DFL, DFY, DIF, DLF, DLY, DYF, DYL, YFL, EFF, EFI, EFL, 0, EFY, EIF, ELF, ELY, EYF, EYL, FFA, FFD, FFE, FFF, FFI, FFK, FFL, FFR, FFS, FFT, FFV, FFY, FYA, FYD, FYE, FYF, FYI, FYK, FYL, FYR, FYS, FYT, FYV, FYY, IFA, IFF, IFI, IFL, IFV, IFY, IIF, IL, ILF, ILI, ILL, ILY, IYF, IYL, LFA, LFF, LFI, LFL, LFV, LFY, LIF, LII, LIL, LIY, LLF, LLI, LLL, LLY, LYA, LYF, LYI, LYL, LYV, LYY, NFF, NFI, NFL, NFY, NIL, NLI, NLL, NYF, NYL, QFF, QFI, QFL, QFY, QIL, QLI, QLL, QYF, QYL, SFF, SFI, SFL, SFY, SIF, SIL, SLF, SLI, SLL, SLY, SYF, SYL, TFF, TFI, TFL, TFY, TIF, TIL, TLF, TLI, TLL, TLY, TYF, TYL, VFF, VFI, VFL, VFY, VIF, VIL, VLF, VLI, VLL, VLY, VYF, VYL, YFA, YFD, YFE, YFF, YFI, YFK, YFL, YFR, YFS, YFT, YFV, YFY, YYF, or YYL.

[0148] In various embodiments, exemplary X or Y region peptide sequences, i.e. peptide sequences that may be cleaved by one or more animal, for example, human protease found in the animal, for example, a human gastrointestinal environment, and one or more insect and/or nematode proteases found in the insect and/or nematode gut/hemolymph environment may include: AFG, AGF, AGL, ALG, DLG, ELG, GFK, GFR, IGF, IGL, ILG, LGA, LGF, LGI, LGL, LGV, LGY, LIG, LLG, NLG, QLG, VFG, VGF, VGL, or VLG.

[0149] In some illustrative examples, a binary peptide of the present invention can comprise the formula: X₁-X₂-Y₁-Y₂, X₁-X₂-X₃-Y₁-Y₂, X₁-X₂-X₃-X₄-Y₁-Y₂, X₁-X₂-Y₁-Y₂-Y₃, X₁-X₂-X₃-Y₁-Y₂-Y₃, X₁-X₂-X₃-X₄-Y₁-Y₂-Y₃, X₁-X₂-Y₁-Y₂-Y₃-Y₄, X₁-X₂-X₃-Y₁-Y₂-Y₃-Y₄, X₁-X₂-X₃-X₄-Y₁-Y₂-Y₃-Y₄, Y₁-Y₂-X₁-X₂, Y₁-Y₂-X₁-X₂-X₃, Y₁-Y₂-X₁-X₂-X₃-X₄, Y₁-Y₂-Y₃-X₁-X₂, Y₁-Y₂-Y₃-X₁-X₂-X₃, Y₁-Y₂-Y₃-X₁-X₂-X₃-X₄, Y₁-Y₂-Y₃-Y₄-X₁-X₂, Y₁-Y₂-Y₃-Y₄-X₁-X₂-X₃, Y₁-Y₂-Y₃-Y₄-X₁-X₂-X₃-X₄, wherein X₁ is selected from the group consisting of: (all single letter amino acid format) A, D, E, G, I, K, L, N, P, Q, R, and V; X₂ is selected from the group consisting of A, F, G, I, K, L, N, P, Q, R, S, T, V, and Y; X₃ is selected from the group consisting of A, D, E, F, G, I, K, L, N, Q, R, S, T, V, and Y; X₄ is selected from the group consisting of: R, H, K, D, E, S, T, N, Q, G, A, I, L, M, F, W, Y, and V. In some embodiments, Y₁ is selected from the group consisting of: (all single letter amino acid format) A, D, E, F, G, I, L, N, Q, S, T, V, and Y; Y₂ is selected from the group consisting of F, G, I, L, and Y; and Y₃ is selected from the group consisting of A, D, E, F, G, I, K, L, R, S, T, V, and Y; and Y₄ is selected from the group consisting of: R, H, K, D, E, S, T, N, Q, G, A, I, L, M, F, W, Y, and V.

[0150] In some embodiments, illustrative binary peptides (XY or YX) comprise the following amino acid sequences: AFVRLF (SEQ ID NO: 1594), AKLFV (SEQ ID NO: 1595), ALFALK (SEQ ID NO: 1596), ALFLK (SEQ ID NO: 1597), ALFLR (SEQ ID NO: 1598), ALFR (SEQ ID NO: 1599), ALFRLR (SEQ ID NO: 1600), ALKALF (SEQ ID NO: 1601), ALKFF (SEQ ID NO: 1602), ALKFLV (SEQ ID NO: 1603), ALKIFV (SEQ ID NO: 1604), ALKLFV (SEQ ID NO: 1605), FFADIK (SEQ ID NO: 1606), FFALK (SEQ ID NO: 1607), FFLK (SEQ ID NO: 1608), FFLR (SEQ ID NO: 1609), FFRLR (SEQ ID NO: 1610), FGYRIK (SEQ ID NO: 1611), FLRLF (SEQ ID NO: 1612), FYARR (SEQ ID NO: 1613), GGLRKK (SEQ ID NO: 1614), IFVALK (SEQ ID NO: 1615), IFVLK (SEQ ID NO: 1616), IFVLR (SEQ ID NO: 1617), IFVR (SEQ ID NO: 1618), IFVRLR (SEQ ID NO: 1619), ILFNIK (SEQ ID NO: 1620), LFAAPF (SEQ ID NO: 1621), LFVALK (SEQ ID NO: 1622), LFVLK (SEQ ID NO: 1623), LFVLR (SEQ ID NO: 1624), LFVR (SEQ ID NO: 1625), LFVRLR (SEQ ID NO: 1626), LFVRVFL (SEQ ID NO: 1627), LGER (SEQ ID NO: 1628), LKALF (SEQ ID NO: 1629), LKFF (SEQ ID NO: 1630), LKIFV (SEQ ID NO: 1631), LKLFV (SEQ ID NO: 1632), LRALF (SEQ ID NO: 1633), LRFF (SEQ ID NO: 1634), LRIFV (SEQ ID NO: 1635), LRLFV (SEQ ID NO: 1636), RALF (SEQ ID NO: 1637), RIFV (SEQ ID NO: 1638), RLFV (SEQ ID NO: 1639), RLRALF (SEQ ID NO: 1640), RLRFF (SEQ ID NO: 1641), RLRIFV (SEQ ID NO: 1642), RLRLFV (SEQ ID NO: 1643), RRKAFV (SEQ ID NO: 1644), RRKLIF (SEQ ID NO: 1645), RRRFFA (SEQ ID NO: 1646), VFGRKG (SEQ ID NO: 1647), and YFVRK (SEQ ID NO: 1648).

[0151] In various embodiments, exemplary binary peptides for use in the insecticidal and/or nematicidal polypeptides and proteins, DNA constructs and incorporated into transgenic plants or parts thereof, of the present invention may include one or more cleavable binary peptides selected from the group of or consisting of: IFVRLR (SEQ ID NO: 1619), ALKLFV (SEQ ID NO: 1605), ALKFLV (SEQ ID NO: 1603), RRKAFV (SEQ ID NO: 1644), or LFAAPF (SEQ ID NO: 1621).

[0152] (1C). Descriptions and Examples of Tertiary Peptides

[0153] In various embodiments, tertiary peptides can include all of the illustrative binary peptides illustrated above with the addition of 1 to 4 amino acids fused in frame to the N-terminus, the C-terminus or both termini of the binary peptide. In some embodiments, the tertiary peptides of the present invention can include all of the illustrative binary peptides disclosed above having one, two, three or four amino acids fused in frame to the N-terminus, the C-terminus, or both termini of an exemplary binary peptide. In another example, an illustrative tertiary peptide can include an X(₂₋₄)Y(₂₋₄), or Y(₂₋₄)X(₂₋₄), with the addition of a Z(₁₋₄) positioned in frame with the N-terminus, or the C-terminus or both termini, of a binary peptide as defined above. In some illustrative examples, various tertiary peptide examples can include the amino acid sequence: Z₁-X₁-X₂-Y₁-Y₂, Z₁-X₁-X₂-X₃-Y₁-Y₂, Z₁-X₁-X₂-X₃-X₄-Y₁-Y₂, Z₁-X₁-X₂-Y₁-Y₂-Y₃, Z₁-X₁-X₂-X₃-Y₁-Y₂-Y₃, Z₁-X₁-X₂-X₃-X₄-Y₁-Y₂-Y₃, Z₁-X₁-X₂-Y₁-Y₂-Y₃-Y₄, Z₁-X₁-X₂-X₃-Y₁-Y₂-Y₃-Y₄, Z₁-X₁-X₂-X₃-X₄-Y₁-Y₂-Y₃-Y₄, Z₁-Z₂-X₁-X₂-Y₁-Y₂, Z₁-Z₂-X₁-X₂-X₃-Y₁-Y₂, Z₁-Z₂-X₁-X₂-X₃-X₄-Y₁-Y₂, Z₁-Z₂-X₁-X₂-Y₁-Y₂-Y₃, Z₁-Z₂-X₁-X₂-X₃-Y₁-Y₂-Y₃, Z₁-Z₂-X₁-X₂-X₃-X₄-Y₁-Y₂-Y₃, Z₁-Z₂-X₁-X₂-Y₁-Y₂-Y₃-Y₄, Z₁-Z₂-X₁-X₂-X₃-Y₁-Y₂-Y₃-Y₄, Z₁-Z₂-X₁-X₂-X₃-X₄-Y₁-Y₂-Y₃-Y₄, Z₁-Z₂-Z₃-X₁-X₂-Y₁-Y₂, Z₁-Z₂-Z₃-X₁-X₂-X₃-Y₁-Y₂, Z₁-Z₂-Z₃-X₁-X₂-X₃-X₄-Y₁-Y₂, Z₁-Z₂-Z₃-X₁-X₂-Y₁-Y₂-Y₃, Z₁-Z₂-Z₃-X₁-X₂-X₃-Y₁-Y₂-Y₃, Z₁-Z₂-Z₃-X₁-X₂-X₃-X₄-Y₁-Y₂-Y₃, Z₁-Z₂-Z₃-X₁-X₂-Y₁-Y₂-Y₃-Y₄, Z₁-Z₂-Z₃-X₁-X₂-X₃-Y₁-Y₂-Y₃-Y₄, Z₁-Z₂-Z₃-X₁-X₂-X₃-X₄-Y₁-Y₂-Y₃-Y₄, Z₁-Z₂-Z₃-Z₄-X₁-X₂-Y₁-Y₂, Z₁-Z₂-Z₃-Z₄-X₁-X₂-X₃-Y₁-Y₂, Z₁-Z₂-Z₃-Z₄-X₁-X₂-X₃-X₄-Y₁-Y₂, Z₁-Z₂-Z₃-Z₄-X₁-X₂-Y₁-Y₂-Y₃, Z₁-Z₂-Z₃-Z₄-X₁-X₂-X₃-Y₁-Y₂-Y₃, Z₁-Z₂-Z₃-Z₄-X₁-X₂-X₃-X₄-Y₁-Y₂-Y₃, Z₁-Z₂-Z₃-Z₄-X₁-X₂-Y₁-Y₂-Y₃-Y₄, Z₁-Z₂-Z₃-Z₄-X₁-X₂-X₃-Y₁-Y₂-Y₃-Y₄, Z₁-Z₂-Z₃-Z₄-X₁-X₂-X₃-X₄-Y₁-Y₂-Y₃-Y₄, X₁-X₂-Y₁-Y₂-Z₁, X₁-X₂-X₃-Y₁-Y₂-Z₁, X₁-X₂-X₃-X₄-Y₁-Y₂-Z₁, X₁-X₂-Y₁-Y₂-Y₃-Z₁, X₁-X₂-X₃-Y₁-Y₂-Y₃-Z₁, X₁-X₂-X₃-X₄-Y₁-Y₂-Y₃-Z₁, X₁-X₂-Y₁-Y₂-Y₃-Y₄-Z₁, X₁-X₂-X₃-Y₁-Y₂-Y₃-Y₄-Z₁, X₁-X₂-X₃-X₄-Y₁-Y₂-Y₃-Y₄-Z₁, Z₁-X₁-X₂-Y₁-Y₂-Z₁, Z₁-X₁-X₂-X₃-Y₁-Y₂-Z₁, Z₁-X₁-X₂-X₃-X₄-Y₁-Y₂-Z₁, Z₁-X₁-X₂-Y₁-Y₂-Y₃-Z₁, Z₁-X₁-X₂-X₃-Y₁-Y₂-Y₃-Z₁, Z₁-X₁-X₂-X₃-X₄-Y₁-Y₂-Y₃-Z₁, Z₁-X₁-X₂-Y₁-Y₂-Y₃-Y₄-Z₁, Z₁-X₁-X₂-X₃-Y₁-Y₂-Y₃-Y₄-Z₁, Z₁-X₁-X₂-X₃-X₄-Y₁-Y₂-Y₃-Y₄-Z₁, Z₁-Z₂-X₁-X₂-Y₁-Y₂-Z₁, Z₁-Z₂-X₁-X₂-X₃-Y₁-Y₂-Z₁, Z₁-Z₂-X₁-X₂-X₃-X₄-Y₁-Y₂-Z₁, Z₁-Z₂-X₁-X₂-Y₁-Y₂-Y₃-Z₁, Z₁-Z₂-X₁-X₂-X₃-Y₁-Y₂-Y₃-Z₁, Z₁-Z₂-X₁-X₂-X₃-X₄-Y₁-Y₂-Y₃-Z₁, Z₁-Z₂-X₁-X₂-Y₁-Y₂-Y₃-Y₄-Z₁, Z₁-Z₂-X₁-X₂-X₃-Y₁-Y₂-Y₃-Y₄-Z₁, Z₁-Z₂-X₁-X₂-X₃-X₄-Y₁-Y₂-Y₃-Y₄-Z₁, Z₁-Z₂-Z₃-X₁-X₂-Y₁-Y₂-Z₁, Z₁-Z₂-Z₃-X₁-X₂-X₃-Y₁-Y₂-Z₁, Z₁-Z₂-Z₃-X₁-X₂-X₃-X₄-Y₁-Y₂-Z₁, Z₁-Z₂-Z₃-X₁-X₂-Y₁-Y₂-Y₃-Z₁, Z₁-Z₂-Z₃-X₁-X₂-X₃-Y₁-Y₂-Y₃-Z₁, Z₁-Z₂-Z₃-X₁-X₂-X₃-X₄-Y₁-Y₂-Y₃-Z₁, Z₁-Z₂-Z₃-X₁-X₂-Y₁-Y₂-Y₃-Y₄-Z₁, Z₁-Z₂-Z₃-X₁-X₂-X₃-Y₁-Y₂-Y₃-Y₄-Z₁, Z₁-Z₂-Z₃-X₁-X₂-X₃-X₄-Y₁-Y₂-Y₃-Y₄-Z₁, Z₁-Z₂-Z₃-Z₄-X₁-X₂-Y₁-Y₂-Z₁, Z₁-Z₂-Z₃-Z₄-X₁-X₂-X₃-Y₁-Y₂-Z₁, Z₁-Z₂-Z₃-Z₄-X₁-X₂-X₃-X₄-Y₁-Y₂-Z₁, Z₁-Z₂-Z₃-Z₄-X₁-X₂-Y₁-Y₂-Y₃-Z₁, Z₁-Z₂-Z₃-Z₄-X₁-X₂-X₃-Y₁-Y₂-Y₃-Z₁, Z₁-Z₂-Z₃-Z₄-X₁-X₂-X₃-X₄-Y₁-Y₂-Y₃-Z₁, Z₁-Z₂-Z₃-Z₄-X₁-X₂-Y₁-Y₂-Y₃-Y₄-Z₁, Z₁-Z₂-Z₃-Z₄-X₁-X₂-X₃-Y₁-Y₂-Y₃-Y₄-Z, Z₁-Z₂-Z₃-Z₄-X₁-X₂-X₃-X₄-Y₁-Y₂-Y₃-Y₄-Z₁, X₁-X₂-Y₁-Y₂-Z₁-Z₂, X₁-X₂-X₃-Y₁-Y₂-Z₁-Z₂, X₁-X₂-X₃-X₄-Y₁-Y₂-Z₁-Z₂, X₁-X₂-Y₁-Y₂-Y₃-Z₁-Z₂, X₁-X₂-X₃-Y₁-Y₂-Y₃-Z₁-Z₂, X₁-X₂-X₃-X₄-Y₁-Y₂-Y₃-Z₁-Z₂, X₁-X₂-Y₁-Y₂-Y₃-Y₄-Z₁-Z₂, X₁-X₂-X₃-Y₁-Y₂-Y₃-Y₄-Z₁-Z₂, X₁-X₂-X₃-X₄-Y₁-Y₂-Y₃-Y₄-Z₁-Z₂, Z₁-X₁-X₂-Y₁-Y₂-Z₁-Z₂, Z₁-X₁-X₂-X₃-Y₁-Y₂-Z₁-Z₂, Z₁-X₁-X₂-X₃-X₄-Y₁-Y₂-Z₁-Z₂, Z₁-X₁-X₂-Y₁-Y₂-Y₃-Z₁-Z₂, Z₁-X₁-X₂-X₃-Y₁-Y₂-Y₃-Z₁-Z₂, Z₁-X₁-X₂-X₃-X₄-Y₁-Y₂-Y₃-Z₁-Z₂, Z₁-X₁-X₂-Y₁-Y₂-Y₃-Y₄-Z₁-Z₂, Z₁-X₁-X₂-X₃-Y₁-Y₂-Y₃-Y₄-Z₁-Z₂, Z₁-X₁-X₂-X₃-X₄-Y₁-Y₂-Y₃-Y₄-Z₁-Z₂, Z₁-Z₂-X₁-X₂-Y₁-Y₂-Z₁-Z₂, Z₁-Z₂-X₁-X₂-X₃-Y₁-Y₂-Z₁-Z₂, Z₁-Z₂-X₁-X₂-X₃-X₄-Y₁-Y₂-Z₁-Z₂, Z₁-Z₂-X₁-X₂-Y₁-Y₂-Y₃-Z₁-Z₂, Z₁-Z₂-X₁-X₂-X₃-Y₁-Y₂-Y₃-Z₁-Z₂, Z₁-Z₂-X₁-X₂-X₃-X₄-Y₁-Y₂-Y₃-Z₁-Z₂, Z₁-Z₂-X₁-X₂-Y₁-Y₂-Y₃-Y₄-Z₁-Z₂, Z₁-Z₂-X₁-X₂-X₃-Y₁-Y₂-Y₃-Y₄-Z₁-Z₂, Z₁-Z₂-X₁-X₂-X₃-X₄-Y₁-Y₂-Y₃-Y₄-Z₁-Z₂, Z₁-Z₂-Z₃-X₁-X₂-Y₁-Y₂-Z₁-Z₂, Z₁-Z₂-Z₃-X₁-X₂-X₃-Y₁-Y₂-Z₁-Z₂, Z₁-Z₂-Z₃-X₁-X₂-X₃-X₄-Y₁-Y₂-Z₁-Z₂, Z₁-Z₂-Z₃-X₁-X₂-Y₁-Y₂-Y₃-Z₁-Z₂, Z₁-Z₂-Z₃-X₁-X₂-X₃-Y₁-Y₂-Y₃-Z₁-Z₂, Z₁-Z₂-Z₃-X₁-X₂-X₃-X₄-Y₁-Y₂-Y₃-Z₁-Z₂, Z₁-Z₂-Z₃-X₁-X₂-Y₁-Y₂-Y₃-Y₄-Z₁-Z₂, Z₁-Z₂-Z₃-X₁-X₂-X₃-Y₁-Y₂-Y₃-Y₄-Z₁-Z₂, Z₁-Z₂-Z₃-X₁-X₂-X₃-X₄-Y₁-Y₂-Y₃-Y₄-Z₁-Z₂, Z₁-Z₂-Z₃-Z₄-X₁-X₂-Y₁-Y₂-Z₁-Z₂, Z₁-Z₂-Z₃-Z₄-X₁-X₂-X₃-Y₁-Y₂-Z₁-Z₂, Z₁-Z₂-Z₃-Z₄-X₁-X₂-X₃-X₄-Y₁-Y₂-Z₁-Z₂, Z₁-Z₂-Z₃-Z₄-X₁-X₂-Y₁-Y₂-Y₃-Z₁-Z₂, Z₁-Z₂-Z₃-Z₄-X₁-X₂-X₃-Y₁-Y₂-Y₃-Z₁-Z₂, Z₁-Z₂-Z₃-Z₄-X₁-X₂-X₃-X₄-Y₁-Y₂-Y₃-Z₁-Z₂, Z₁-Z₂-Z₃-Z₄-X₁-X₂-Y₁-Y₂-Y₃-Y₄-Z₁-Z₂, Z₁-Z₂-Z₃-Z₄-X₁-X₂-X₃-Y₁-Y₂-Y₃-Y₄-Z₁-Z₂, Z₁-Z₂-Z₃-Z₄-X₁-X₂-X₃-X₄-Y₁-Y₂-Y₃-Y₄-Z₁-Z₂, X₁-X₂-Y₁-Y₂-Z₁-Z₂-Z₃, X₁-X₂-X₃-Y₁-Y₂-Z₁-Z₂-Z₃, X₁-X₂-X₃-X₄-Y₁-Y₂-Z₁-Z₂-Z₃, X₁-X₂-Y₁-Y₂-Y₃-Z₁-Z₂-Z₃, X₁-X₂-X₃-Y₁-Y₂-Y₃-Z₁-Z₂-Z₃, X₁-X₂-X₃-X₄-Y₁-Y₂-Y₃-Z₁-Z₂-Z₃, X₁-X₂-Y₁-Y₂-Y₃-Y₄-Z₁-Z₂-Z₃, X₁-X₂-X₃-Y₁-Y₂-Y₃-Y₄-Z₁-Z₂-Z₃, X₁-X₂-X₃-X₄-Y₁-Y₂-Y₃-Y₄-Z₁-Z₂-Z₃, Z₁-X₁-X₂-Y₁-Y₂-Z₁-Z₂-Z₃, Z₁-X₁-X₂-X₃-Y₁-Y₂-Z₁-Z₂-Z₃, Z₁-X₁-X₂-X₃-X₄-Y₁-Y₂-Z₁-Z₂-Z₃, Z₁-X₁-X₂-Y₁-Y₂-Y₃-Z₁-Z₂-Z₃, Z₁-X₁-X₂-X₃-Y₁-Y₂-Y₃-Z₁-Z₂-Z₃, Z₁-X₁-X₂-X₃-X₄-Y₁-Y₂-Y₃-Z₁-Z₂-Z₃, Z₁-X₁-X₂-Y₁-Y₂-Y₃-Y₄-Z₁-Z₂-Z₃, Z₁-X₁-X₂-X₃-Y₁-Y₂-Y₃-Y₄-Z₂-Z₃, Z₁-X₁-X₂-X₃-X₄-Y₁-Y₂-Y₃-Y₄-Z₁-Z₂-Z₃, Z₁-Z₂-X₁-X₂-Y₁-Y₂-Z₁-Z₂-Z₃, Z₁-Z₂-X₁-X₂-X₃-Y₁-Y₂-Z₁-Z₂-Z₃, Z₁-Z₂-X₁-X₂-X₃-X₄-Y₁-Y₂-Z₁-Z₂-Z₃, Z₁-Z₂-X₁-X₂-Y₁-Y₂-Y₃-Z₁-Z₂-Z₃, Z₁-Z₂-X₁-X₂-X₃-Y₁-Y₂-Y₃-Z₁-Z₂-Z₃, Z₁-Z₂-X₁-X₂-X₃-X₄-Y₁-Y₂-Y₃-Z₁-Z₂-Z₃, Z₁-Z₂-X₁-X₂-Y₁-Y₂-Y₃-Y₄-Z₁-Z₂-Z₃, Z₁-Z₂-X₁-X₂-X₃-Y₁-Y₂-Y₃-Y₄-Z₁-Z₂-Z₃, Z₁-Z₂-X₁-X₂-X₃-X₄-Y₁-Y₂-Y₃-Y₄-Z₁-Z₂-Z₃, Z₁-Z₂-Z₃-X₁-X₂-Y₁-Y₂-Z₁-Z₂-Z₃, Z₁-Z₂-Z₃-X₁-X₂-X₃-Y₁-Y₂-Z₁-Z₂-Z₃, Z₁-Z₂-Z₃-X₁-X₂-X₃-X₄-Y₁-Y₂-Z₁-Z₂-Z₃, Z₁-Z₂-Z₃-X₁-X₂-Y₁-Y₂-Y₃-Z₁-Z₂-Z₃, Z₁-Z₂-Z₃-X₁-X₂-X₃-Y₁-Y₂-Y₃-Z₁-Z₂-Z₃, Z₁-Z₂-Z₃-X₁-X₂-X₃-X₄-Y₁-Y₂-Y₃-Z₁-Z₂-Z₃, Z₁-Z₂-Z₃-X₁-X₂-Y₁-Y₂-Y₃-Y₄-Z₁-Z₂-Z₃, Z₁-Z₂-Z₃-X₁-X₂-X₃-Y₁-Y₂-Y₃-Y₄-Z₁-Z₂-Z₃, Z₁-Z₂-Z₃-X₁-X₂-X₃-X₄-Y₁-Y₂-Y₃-Y₄-Z₁-Z₂-Z₃, Z₁-Z₂-Z₃-Z₄-X₁-X₂-Y₁-Y₂-Z₁-Z₂-Z₃, Z₁-Z₂-Z₃-Z₄-X₁-X₂-X₃-Y₁-Y₂-Z₁-Z₂-Z₃, Z₁-Z₂-Z₃-Z₄-X₁-X₂-X₃-X₄-Y₁-Y₂-Z₁-Z₂-Z₃, Z₁-Z₂-Z₃-Z₄-X₁-X₂-Y₁-Y₂-Y₃-Z₁-Z₂-Z₃, Z₁-Z₂-Z₃-Z₄-X₁-X₂-X₃-Y₁-Y₂-Y₃-Z₁-Z₂-Z₃, Z₁-Z₂-Z₃-Z₄-X₁-X₂-X₃-X₄-Y₁-Y₂-Y₃-Z₁-Z₂-Z₃, Z₁-Z₂-Z₃-Z₄-X₁-X₂-Y₁-Y₂-Y₃-Y₄-Z₁-Z₂-Z₃, Z₁-Z₂-Z₃-Z₄-X₁-X₂-X₃-Y₁-Y₂-Y₃-Y₄-Z₁-Z₂-Z₃, Z₁-Z₂-Z₃-Z₄-X₁-X₂-X₃-X₄-Y₁-Y₂-Y₃-Y₄-Z₁-Z₂-Z₃, X₁-X₂-Y₁-Y₂-Z₁-Z₂-Z₃-Z₄, X₁-X₂-X₃-Y₁-Y₂-Z₁-Z₂-Z₃-Z₄, X₁-X₂-X₃-X₄-Y₁-Y₂-Z₁-Z₂-Z₃-Z₄, X₁-X₂-Y₁-Y₂-Y₃-Z₁-Z₂-Z₃-Z₄, X₁-X₂-X₃-Y₁-Y₂-Y₃-Z₁-Z₂-Z₃-Z₄, X₁-X₂-X₃-X₄-Y₁-Y₂-Y₃-Z₁-Z₂-Z₃-Z₄, X₁-X₂-Y₁-Y₂-Y₃-Y₄-Z₁-Z₂-Z₃-Z₄, X₁-X₂-X₃-Y₁-Y₂-Y₃-Y₄-Z₁-Z₂-Z₃-Z₄, X₁-X₂-X₃-X₄-Y₁-Y₂-Y₃-Y₄-Z₁-Z₂-Z₃-Z₄, Z₁-X₁-X₂-Y₁-Y₂-Z₁-Z₂-Z₃-Z₄, Z₁-X₁-X₂-X₃-Y₁-Y₂-Z₁-Z₂-Z₃-Z₄, Z₁-X₁-X₂-X₃-X₄-Y₁-Y₂-Z₁-Z₂-Z₃-Z₄, Z₁-X₁-X₂-Y₁-Y₂-Y₃-Z₁-Z₂-Z₃-Z₄, Z₁-X₁-X₂-X₃-Y₁-Y₂-Y₃-Z₁-Z₂-Z₃-Z₄, Z₁-X₁-X₂-X₃-X₄-Y₁-Y₂-Y₃-Z₁-Z₂-Z₃-Z₄, Z₁-X₁-X₂-Y₁-Y₂-Y₃-Y₄-Z₁-Z₂-Z₃-Z₄, Z₁-X₁-X₂-X₃-Y₁-Y₂-Y₃-Y₄-Z₁-Z₂-Z₃-Z₄, Z₁-X₁-X₂-X₃-X₄-Y₁-Y₂-Y₃-Y₄-Z₁-Z₂-Z₃-Z₄, Z₁-Z₂-X₁-X₂-Y₁-Y₂-Z₁-Z₂-Z₃-Z₄, Z₁-Z₂-X₁-X₂-X₃-Y₁-Y₂-Z₁-Z₂-Z₃-Z₄, Z₁-Z₂-X₁-X₂-X₃-X₄-Y₁-Y₂-Z₁-Z₂-Z₃-Z₄, Z₁-Z₂-X₁-X₂-Y₁-Y₂-Y₃-Z₁-Z₂-Z₃-Z₄, Z₁-Z₂-X₁-X₂-X₃-Y₁-Y₂-Y₃-Z₁-Z₂-Z₃-Z₄, Z₁-Z₂-X₁-X₂-X₃-X₄-Y₁-Y₂-Y₃-Z₁-Z₂-Z₃-Z₄, Z₁-Z₂-X₁-X₂-Y₁-Y₂-Y₃-Y₄-Z₁-Z₂-Z₃-Z₄, Z₁-Z₂-X₁-X₂-X₃-Y₁-Y₂-Y₃-Y₄-Z₁-Z₂-Z₃-Z₄, Z₁-Z₂-X₁-X₂-X₃-X₄-Y₁-Y₂-Y₃-Y₄-Z₁-Z₂-Z₃-Z₄, Z₁-Z₂-Z₃-X₁-X₂-Y₁-Y₂-Z₁-Z₂-Z₃-Z₄, Z₁-Z₂-Z₃-X₁-X₂-X₃-Y₁-Y₂-Z₁-Z₂-Z₃-Z₄, Z₁-Z₂-Z₃-X₁-X₂-X₃-X₄-Y₁-Y₂-Z₁-Z₂-Z₃-Z₄, Z₁-Z₂-Z₃-X₁-X₂-Y₁-Y₂-Y₃-Z₁-Z₂-Z₃-Z₄, Z₁-Z₂-Z₃-X₁-X₂-X₃-Y₁-Y₂-Y₃-Z₁-Z₂-Z₃-Z₄, Z₁-Z₂-Z₃-X₁-X₂-X₃-X₄-Y₁-Y₂-Y₃-Z₁-Z₂-Z₃-Z₄, Z₁-Z₂-Z₃-X₁-X₂-Y₁-Y₂-Y₃-Y₄-Z₁-Z₂-Z₃-Z₄, Z₁-Z₂-Z₃-X₁-X₂-X₃-Y₁-Y₂-Y₃-Y₄-Z₁-Z₂-Z₃-Z₄, Z₁-Z₂-Z₃-X₁-X₂-X₃-X₄-Y₁-Y₂-Y₃-Y₄-Z₁-Z₂-Z₃-Z₄, Z₁-Z₂-Z₃-Z₄-X₁-X₂-Y₁-Y₂-Z₁-Z₂-Z₃-Z₄, Z₁-Z₂-Z₃-Z₄-X₁-X₂-X₃-Y₁-Y₂-Z₁-Z₂-Z₃-Z₄, Z₁-Z₂-Z₃-Z₄-X₁-X₂-X₃-X₄-Y₁-Y₂-Z₁-Z₂-Z₃-Z₄, Z₁-Z₂-Z₃-Z₄-X₁-X₂-Y₁-Y₂-Y₃-Z₁-Z₂-Z₃-Z₄, Z₁-Z₂-Z₃-Z₄-X₁-X₂-X₃-Y₁-Y₂-Y₃-Z₁-Z₂-Z₃-Z₄, Z₁-Z₂-Z₃-Z₄-X₁-X₂-X₃-X₄-Y₁-Y₂-Y₃-Z₁-Z₂-Z₃-Z₄, Z₁-Z₂-Z₃-Z₄-X₁-X₂-Y₁-Y₂-Y₃-Y₄-Z₁-Z₂-Z₃-Z₄, Z₁-Z₂-Z₃-Z₄-X₁-X₂-X₃-Y₁-Y₂-Y₃-Y₄-Z₁-Z₂-Z₃-Z₄, Z₁-Z₂-Z₃-Z₄-X₁-X₂-X₃-X₄-Y₁-Y₂-Y₃-Y₄-Z₁-Z₂-Z₃-Z₄, Z₁-Y₁-Y₂-X₁-X₂, Z₁-Y₁-Y₂-X₁-X₂-X₃, Z₁-Y₁-Y₂-X₁-X₂-X₃-X₄, Z₁-Y₁-Y₂-Y₃-X₁-X₂, Z₁-Y₁-Y₂-Y₃-X₁-X₂-X₃, Z₁-Y₁-Y₂-Y₃-X₁-X₂-X₃-X₄, Z₁-Y₁-Y₂-Y₃-Y₄-X₁-X₂, Z₁-Y₁-Y₂-Y₃-Y₄-X₁-X₂-X₃, Z₁-Y₁-Y₂-Y₃-Y₄-X₁-X₂-X₃-X₄, Z₁-Z₂-Y₁-Y₂-X₁-X₂, Z₁-Z₂-Y₁-Y₂-X₁-X₂-X₃, Z₁-Z₂-Y₁-Y₂-X₁-X₂-X₃-X₄, Z₁-Z₂-Y₁-Y₂-Y₃-X₁-X₂, Z₁-Z₂-Y₁-Y₂-Y₃-X₁-X₂-X₃, Z₁-Z₂-Y₁-Y₂-Y₃-X₁-X₂-X₃-X₄, Z₁-Z₂-Y₁-Y₂-Y₃-Y₄-X₁-X₂, Z₁-Z₂-Y₁-Y₂-Y₃-Y₄-X₁-X₂-X₃, Z₁-Z₂-Y₁-Y₂-Y₃-Y₄-X₁-X₂-X₃-X₄, Z₁-Z₂-Z₃-Y₁-Y₂-X₁-X₂, Z₁-Z₂-Z₃-Y₁-Y₂-X₁-X₂-X₃, Z₁-Z₂-Z₃-Y₁-Y₂-X₁-X₂-X₃-X₄, Z₁-Z₂-Z₃-Y₁-Y₂-Y₃-X₁-X₂, Z₁-Z₂-Z₃-Y₁-Y₂-Y₃-X₁-X₂-X₃, Z₁-Z₂-Z₃-Y₁-Y₂-Y₃-X₁-X₂-X₃-X₄, Z₁-Z₂-Z₃-Y₁-Y₂-Y₃-Y₄-X₁-X₂, Z₁-Z₂-Z₃-Y₁-Y₂-Y₃-Y₄-X₁-X₂-X₃, Z₁-Z₂-Z₃-Y₁-Y₂-Y₃-Y₄-X₁-X₂-X₃-X₄, Z₁-Z₂-Z₃-Z₄-Y₁-Y₂-X₁-X₂, Z₁-Z₂-Z₃-Z₄-Y₁-Y₂-X₁-X₂-X₃, Z₁-Z₂-Z₃-Z₄-Y₁-Y₂-X₁-X₂-X₃-X₄, Z₁-Z₂-Z₃-Z₄-Y₁-Y₂-Y₃-X₁-X₂, Z₁-Z₂-Z₃-Z₄-Y₁-Y₂-Y₃-X₁-X₂-X₃, Z₁-Z₂-Z₃-Z₄-Y₁-Y₂-Y₃-X₁-X₂-X₃-X₄, Z₁-Z₂-Z₃-Z₄-Y₁-Y₂-Y₃-Y₄-X₁-X₂, Z₁-Z₂-Z₃-Z₄-Y₁-Y₂-Y₃-Y₄-X₁-X₂-X₃, Z₁-Z₂-Z₃-Z₄-Y₁-Y₂-Y₃-Y₄-X₁-X₂-X₃-X₄, Y₁-Y₂-X₁-X₂-Z₁, Y₁-Y₂-X₁-X₂-X₃-Z₁, Y₁-Y₂-X₁-X₂-X₃-X₄-Z₁, Y₁-Y₂-Y₃-X₁-X₂-Z₁, Y₁-Y₂-Y₃-X₁-X₂-X₃-Z₁, Y₁-Y₂-Y₃-X₁-X₂-X₃-X₄-Z₁, Y₁-Y₂-Y₃-Y₄-X₁-X₂-Z₁, Y₁-Y₂-Y₃-Y₄-X₁-X₂-X₃-Z₁, Y₁-Y₂-Y₃-Y₄-X₁-X₂-X₃-X₄-Z₁, Z₁-Y₁-Y₂-X₁-X₂-Z₁, Z₁-Y₁-Y₂-X₁-X₂-X₃-Z₁, Z₁-Y₁-Y₂-X₁-X₂-X₃-X₄-Z₁, Z₁-Y₁-Y₂-Y₃-X₁-X₂-Z₁, Z₁-Y₁-Y₂-Y₃-X₁-X₂-X₃-Z₁, Z₁-Y₁-Y₂-Y₃-X₁-X₂-X₃-X₄-Z₁, Z₁-Y₁-Y₂-Y₃-Y₄-X₁-X₂-Z₁, Z₁-Y₁-Y₂-Y₃-Y₄-X₁-X₂-X₃-Z₁, Z₁-Y₁-Y₂-Y₃-Y₄-X₁-X₂-X₃-X₄-Z₁, Z₁-Z₂-Y₁-Y₂-X₁-X₂-Z₁, Z₁-Z₂-Y₁-Y₂-X₁-X₂-X₃-Z₁, Z₁-Z₂-Y₁-Y₂-X₁-X₂-X₃-X₄-Z₁, Z₁-Z₂-Y₁-Y₂-Y₃-X₁-X₂-Z₁, Z₁-Z₂-Y₁-Y₂-Y₃-X₁-X₂-X₃-Z₁, Z₁-Z₂-Y₁-Y₂-Y₃-X₁-X₂-X₃-X₄-Z₁, Z₁-Z₂-Y₁-Y₂-Y₃-Y₄-X₁-X₂-Z₁, Z₁-Z₂-Y₁-Y₂-Y₃-Y₄-X₁-X₂-X₃-Z₁, Z₁-Z₂-Y₁-Y₂-Y₃-Y₄-X₁-X₂-X₃-X₄-Z₁, Z₁-Z₂-Z₃-Y₁-Y₂-X₁-X₂-Z₁, Z₁-Z₂-Z₃-Y₁-Y₂-X₁-X₂-X₃-Z₁, Z₁-Z₂-Z₃-Y₁-Y₂-X₁-X₂-X₃-X₄-Z₁, Z₁-Z₂-Z₃-Y₁-Y₂-Y₃-X₁-X₂-Z₁, Z₁-Z₂-Z₃-Y₁-Y₂-Y₃-X₁-X₂-X₃-Z₁, Z₁-Z₂-Z₃-Y₁-Y₂-Y₃-X₁-X₂-X₃-X₄-Z₁, Z₁-Z₂-Z₃-Y₁-Y₂-Y₃-Y₄-X₁-X₂-Z₁, Z₁-Z₂-Z₃-Y₁-Y₂-Y₃-Y₄-X₁-X₂-X₃-Z₁, Z₁-Z₂-Z₃-Y₁-Y₂-Y₃-Y₄-X₁-X₂-X₃-X₄-Z₁, Z₁-Z₂-Z₃-Z₄-Y₁-Y₂-X₁-X₂-Z₁, Z₁-Z₂-Z₃-Z₄-Y₁-Y₂-X₁-X₂-X₃-Z₁, Z₁-Z₂-Z₃-Z₄-Y₁-Y₂-X₁-X₂-X₃-X₄-Z₁, Z₁-Z₂-Z₃-Z₄-Y₁-Y₂-Y₃-X₁-X₂-Z₁, Z₁-Z₂-Z₃-Z₄-Y₁-Y₂-Y₃-X₁-X₂-X₃-Z₁, Z₁-Z₂-Z₃-Z₄-Y₁-Y₂-Y₃-X₁-X₂-X₃-X₄-Z₁, Z₁-Z₂-Z₃-Z₄-Y₁-Y₂-Y₃-Y₄-X₁-X₂-Z₁, Z₁-Z₂-Z₃-Z₄-Y₁-Y₂-Y₃-Y₄-X₁-X₂-X₃-Z₁, Z₁-Z₂-Z₃-Z₄-Y₁-Y₂-Y₃-Y₄-X₁-X₂-X₃-X₄-Z₁, Y₁-Y₂-X₁-X₂-Z₁-Z₂, Y₁-Y₂-X₁-X₂-X₃-Z₁-Z₂, Y₁-Y₂-X₁-X₂-X₃-X₄-Z₁-Z₂, Y₁-Y₂-Y₃-X₁-X₂-Z₁-Z₂, Y₁-Y₂-Y₃-X₁-X₂-X₃-Z₁-Z₂, Y₁-Y₂-Y₃-X₁-X₂-X₃-X₄-Z₁-Z₂, Y₁-Y₂-Y₃-Y₄-X₁-X₂-Z₁-Z₂, Y₁-Y₂-Y₃-Y₄-X₁-X₂-X₃-Z₁-Z₂, Y₁-Y₂-Y₃-Y₄-X₁-X₂-X₃-X₄-Z₁-Z₂, Z₁-Y₁-Y₂-X₁-X₂-Z₁-Z₂, Z₁-Y₁-Y₂-X₁-X₂-X₃-Z₁-Z₂, Z₁-Y₁-Y₂-X₁-X₂-X₃-X₄-Z₁-Z₂, Z₁-Y₁-Y₂-Y₃-X₁-X₂-Z₁-Z₂, Z₁-Y₁-Y₂-Y₃-X₁-X₂-X₃-Z₁-Z₂, Z₁-Y₁-Y₂-Y₃-X₁-X₂-X₃-X₄-Z₁-Z₂, Z₁-Y₁-Y₂-Y₃-Y₄-X₁-X₂-Z₁-Z₂, Z₁-Y₁-Y₂-Y₃-Y₄-X₁-X₂-X₃-Z₁-Z₂, Z₁-Y₁-Y₂-Y₃-Y₄-X₁-X₂-X₃-X₄-Z₁-Z₂, Z₁-Z₂-Y₁-Y₂-X₁-X₂-Z₁-Z₂, Z₁-Z₂-Y₁-Y₂-X₁-X₂-X₃-Z₁-Z₂, Z₁-Z₂-Y₁-Y₂-X₁-X₂-X₃-X₄-Z₁-Z₂, Z₁-Z₂-Y₁-Y₂-Y₃-X₁-X₂-Z₁-Z₂, Z₁-Z₂-Y₁-Y₂-Y₃-X₁-X₂-X₃-Z₁-Z₂, Z₁-Z₂-Y₁-Y₂-Y₃-X₁-X₂-X₃-X₄-Z₁-Z₂, Z₁-Z₂-Y₁-Y₂-Y₃-Y₄-X₁-X₂-Z₁-Z₂, Z₁-Z₂-Y₁-Y₂-Y₃-Y₄-X₁-X₂-X₃-Z₁-Z₂, Z₁-Z₂-Y₁-Y₂-Y₃-Y₄-X₁-X₂-X₃-X₄-Z₁-Z₂, Z₁-Z₂-Z₃-Y₁-Y₂-X₁-X₂-Z₁-Z₂, Z₁-Z₂-Z₃-Y₁-Y₂-X₁-X₂-X₃-Z₁-Z₂, Z₁-Z₂-Z₃-Y₁-Y₂-X₁-X₂-X₃-X₄-Z₁-Z₂, Z₁-Z₂-Z₃-Y₁-Y₂-Y₃-X₁-X₂-Z₁-Z₂, Z₁-Z₂-Z₃-Y₁-Y₂-Y₃-X₁-X₂-X₃-Z₁-Z₂, Z₁-Z₂-Z₃-Y₁-Y₂-Y₃-X₁-X₂-X₃-X₄-Z₁-Z₂, Z₁-Z₂-Z₃-Y₁-Y₂-Y₃-Y₄-X₁-X₂-Z₁-Z₂, Z₁-Z₂-Z₃-Y₁-Y₂-Y₃-Y₄-X₁-X₂-X₃-Z₁-Z₂, Z₁-Z₂-Z₃-Y₁-Y₂-Y₃-Y₄-X₁-X₂-X₃-X₄-Z₁-Z₂, Z₁-Z₂-Z₃-Z₄-Y₁-Y₂-X₁-X₂-Z₁-Z₂, Z₁-Z₂-Z₃-Z₄-Y₁-Y₂-X₁-X₂-X₃-Z₁-Z₂, Z₁-Z₂-Z₃-Z₄-Y₁-Y₂-X₁-X₂-X₃-X₄-Z₁-Z₂, Z₁-Z₂-Z₃-Z₄-Y₁-Y₂-Y₃-X₁-X₂-Z₁-Z₂, Z₁-Z₂-Z₃-Z₄-Y₁-Y₂-Y₃-X₁-X₂-X₃-Z₁-Z₂, Z₁-Z₂-Z₃-Z₄-Y₁-Y₂-Y₃-X₁-X₂-X₃-X₄-Z₁-Z₂, Z₁-Z₂-Z₃-Z₄-Y₁-Y₂-Y₃-Y₄-X₁-X₂-Z₁-Z₂, Z₁-Z₂-Z₃-Z₄-Y₁-Y₂-Y₃-Y₄-X₁-X₂-X₃-Z₁-Z₂, Z₁-Z₂-Z₃-Z₄-Y₁-Y₂-Y₃-Y₄-X₁-X₂-X₃-X₄-Z₁-Z₂, Y₁-Y₂-X₁-X₂-Z₁-Z₂-Z₃, Y₁-Y₂-X₁-X₂-X₃-Z₁-Z₂-Z₃, Y₁-Y₂-X₁-X₂-X₃-X₄-Z₁-Z₂-Z₃, Y₁-Y₂-Y₃-X₁-X₂-Z₁-Z₂-Z₃, Y₁-Y₂-Y₃-X₁-X₂-X₃-Z₁-Z₂-Z₃, Y₁-Y₂-Y₃-X₁-X₂-X₃-X₄-Z₁-Z₂-Z₃, Y₁-Y₂-Y₃-Y₄-X₁-X₂-Z₁-Z₂-Z₃, Y₁-Y₂-Y₃-Y₄-X₁-X₂-X₃-Z₁-Z₂-Z₃, Y₁-Y₂-Y₃-Y₄-X₁-X₂-X₃-X₄-Z₁-Z₂-Z₃, Z₁-Y₁-Y₂-X₁-X₂-Z₁-Z₂-Z₃, Z₁-Y₁-Y₂-X₁-X₂-X₃-Z₁-Z₂-Z₃, Z₁-Y₁-Y₂-X₁-X₂-X₃-X₄-Z₁-Z₂-Z₃, Z₁-Y₁-Y₂-Y₃-X₁-X₂-Z₁-Z₂-Z₃, Z₁-Y₁-Y₂-Y₃-X₁-X₂-X₃-Z₁-Z₂-Z₃, Z₁-Y₁-Y₂-Y₃-X₁-X₂-X₃-X₄-Z₁-Z₂-Z₃, Z₁-Y₁-Y₂-Y₃-Y₄-X₁-X₂-Z₁-Z₂-Z₃, Z₁-Y₁-Y₂-Y₃-Y₄-X₁-X₂-X₃-Z₁-Z₂-Z₃, Z₁-Y₁-Y₂-Y₃-Y₄-X₁-X₂-X₃-X₄-Z₁-Z₂-Z₃, Z₁-Z₂-Y₁-Y₂-X₁-X₂-Z₁-Z₂-Z₃, Z₁-Z₂-Y₁-Y₂-X₁-X₂-X₃-Z₁-Z₂-Z₃, Z₁-Z₁-Y₁-Y₂-X₁-X₂-X₃-X₄-Z₁-Z₂-Z₃, Z₁-Z₂-Y₁-Y₂-Y₃-X₁-X₂-Z₁-Z₂-Z₃, Z₁-Z₂-Y₁-Y₂-Y₃-X₁-X₂-X₃-Z₁-Z₂-Z₃, Z₁-Z₂-Y₁-Y₂-Y₃-X₁-X₂-X₃-X₄-Z₁-Z₂-Z₃, Z₁-Z₂-Y₁-Y₂-Y₃-Y₄-X₁-X₂-Z₁-Z₂-Z₃, Z₁-Z₂-Y₁-Y₂-Y₃-Y₄-X₁-X₂-X₃-Z₁-Z₂-Z₃, Z₁-Z₂-Y₁-Y₂-Y₃-Y₄-X₁-X₂-X₃-X₄-Z₁-Z₂-Z₃, Z₁-Z₂-Z₃-Y₁-Y₂-X₁-X₁-X₂-Z₁-Z₂-Z₃, Z₁-Z₂-Z₃-Y₁-Y₂-X₁-X₂-X₃-Z₁-Z₂-Z₃, Z₁-Z₂-Z₃-Y₁-Y₂-X₁-X₂-X₃-X₄-Z₁-Z₂-Z₃, Z₁-Z₂-Z₃-Y₁-Y₂-Y₃-X₁-X₂-Z₁-Z₂-Z₃, Z₁-Z₂-Z₃-Y₁-Y₂-Y₃-X₁-X₂-X₃-Z₁-Z₂-Z₃, Z₁-Z₂-Z₃-Y₁-Y₂-Y₃-X₁-X₂-X₃-X₄-Z₁-Z₂-Z₃, Z₁-Z₂-Z₃-Y₁-Y₂-Y₃-Y₄-X₁-X₂-Z₁-Z₂-Z₃, Z₁-Z₂-Z₃-Y₁-Y₂-Y₃-Y₄-X₁-X₂-X₃-Z₁-Z₂-Z₃, Z₁-Z₂-Z₃-Y₁-Y₂-Y₃-Y₄-X₁-X₂-X₃-X₄-Z₁-Z₂-Z₃, Z₁-Z₂-Z₃-Z₄-Y₁-Y₂-X₁-X₂-Z₁-Z₂-Z₃, Z₁-Z₂-Z₃-Z₄-Y₁-Y₂-X₁-X₂-X₃-Z₁-Z₂-Z₃, Z₁-Z₂-Z₃-Z₄-Y₁-Y₂-X₁-X₂-X₃-X₄-Z₁-Z₂-Z₃, Z₁-Z₂-Z₃-Z₄-Y₁-Y₂-Y₃-X₁-X₂-Z₁-Z₂-Z₃, Z₁-Z₂-Z₃-Z₄-Y₁-Y₂-Y₃-X₁-X₂-X₃-Z₁-Z₂-Z₃, Z₁-Z₂-Z₃-Z₄-Y₁-Y₂-Y₃-X₁-X₂-X₃-X₄-Z₁-Z₂-Z₃, Z₁-Z₂-Z₃-Z₄-Y₁-Y₂-Y₃-Y₄-X₁-X₂-X₃-Z₁-Z₂-Z₃, Z₁-Z₂-Z₃-Z₄-Y₁-Y₂-Y₃-Y₄-X₁-X₂-X₃-Z₁-Z₂-Z₁-Z₂-Z₃-Z₄-Y₁-Y₂-Y₃-Y₄-X₁-X₂-X₃-X₄-Z₁-Z₂-Z₃, Y₁-Y₂-X₁-X₂-Z₁-Z₂-Z₃-Z₄, Y₁-Y₂-X₁-X₂-X₃-Z₁-Z₂-Z₃-Z₄, Y₁-Y₂-X₁-X₂-X₃-X₄-Z₁-Z₂-Z₃-Z₄, Y₁-Y₂-Y₃-X₁-X₂-Z₁-Z₂-Z₃-Z₄, Y₁-Y₂-Y₃-X₁-X₂-X₃-Z₁-Z₂-Z₃-Z₄, Y₁-Y₂-Y₃-X₁-X₂-X₃-X₄-Z₁-Z₂-Z₃-Z₄, Y₁-Y₂-Y₃-Y₄-X₁-X₂-Z₁-Z₂-Z₃-Z₄, Y₁-Y₂-Y₃-Y₄-X₁-X₂-X₃-Z₁-Z₂-Z₃-Z₄, Y₁-Y₂-Y₃-Y₄-X₁-X₂-X₃-X₄-Z₁-Z₂-Z₃-Z₄, Z₁-Y₁-Y₂-X₁-X₂-Z₁-Z₂-Z₃-Z₄, Z₁-Y₁-Y₂-X₁-X₂-X₃-Z₁-Z₂-Z₃-Z₄, Z₁-Y₁-Y₂-X₁-X₂-X₃-X₄-Z₁-Z₂-Z₃-Z₄, Z₁-Y₁-Y₂-Y₃-X₁-X₂-Z₁-Z₂-Z₃-Z₄, Z₁-Y₁-Y₂-Y₃-X₁-X₂-X₃-Z₁-Z₂-Z₃-Z₄, Z₁-Y₁-Y₂-Y₃-X₁-X₂-X₃-X₄-Z₁-Z₂-Z₃-Z₄, Z₁-Y₁-Y₂-Y₃-Y₄-X₁-X₂-Z₁-Z₂-Z₃-Z₄, Z₁-Y₁-Y₂-Y₃-Y₄-X₁-X₂-X₃-Z₁-Z₂-Z₃-Z₄, Z₁-Y₁-Y₂-Y₃-Y₄-X₁-X₂-X₃-X₄-Z₁-Z₂-Z₃-Z₄, Z₁-Z₂-Y₁-Y₂-X₁-X₂-Z₁-Z₂-Z₃-Z₄, Z₁-Z₂-Y₁-Y₂-X₁-X₂-X₃-Z₁-Z₂-Z₃-Z₄, Z₁-Z₂-Y₁-Y₂-X₁-X₂-X₃-X₄-Z₁-Z₂-Z₃-Z₄, Z₁-Z₂-Y₁-Y₂-Y₃-X₁-X₂-Z₁-Z₂-Z₃-Z₄, Z₁-Z₂-Y₁-Y₂-Y₃-X₁-X₂-X₃-Z₁-Z₂-Z₃-Z₄, Z₁-Z₂-Y₁-Y₂-Y₃-X₁-X₂-X₃-X₄-Z₁-Z₂-Z₃-Z₄, Z₁-Z₂-Y₁-Y₂-Y₃-Y₄-X₁-X₂-Z₁-Z₂-Z₃-Z₄, Z₁-Z₂-Y₁-Y₂-Y₃-Y₄-X₁-X₂-X₃-Z₁-Z₂-Z₃-Z₄, Z₁-Z₂-Y₁-Y₂-Y₃-Y₄-X₁-X₂-X₃-X₄-Z₁-Z₂-Z₃-Z₄, Z₁-Z₂-Z₃-Y₁-Y₂-X₁-X₂-Z₁-Z₂-Z₃-Z₄, Z₁-Z₂-Z₃-Y₁-Y₂-X₁-X₂-X₃-Z₁-Z₂-Z₃-Z₄, Z₁-Z₂-Z₃-Y₁-Y₂-X₁-X₂-X₃-X₄-Z₁-Z₂-Z₃-Z₄, Z₁-Z₂-Z₃-Y₁-Y₂-Y₃-X₁-X₂-Z₁-Z₂-Z₃-Z₄, Z₁-Z₂-Z₃-Y₁-Y₂-Y₃-X₁-X₂-X₃-Z₁-Z₂-Z₃-Z₄, Z₁-Z₂-Z₃-Y₁-Y₂-Y₃-X₁-X₂-X₃-X₄-Z₁-Z₂-Z₃-Z₄, Z₁-Z₂-Z₃-Y₁-Y₂-Y₃-Y₄-X₁-X₂-Z₁-Z₂-Z₃-Z₄, Z₁-Z₂-Z₃-Y₁-Y₂-Y₃-Y₄-X₁-X₂-X₃-Z₁-Z₂-Z₃-Z₄, Z₁-Z₂-Z₃-Y₁-Y₂-Y₃-Y₄-X₁-X₂-X₃-X₄-Z₁-Z₂-Z₃-Z₄, Z₁-Z₂-Z₃-Z₄-Y₁-Y₂-X₁-X₂-Z₁-Z₂-Z₃-Z₄, Z₁-Z₂-Z₃-Z₄-Y₁-Y₂-X₁-X₂-X₃-Z₁-Z₂-Z₃-Z₄, Z₁-Z₂-Z₃-Z₄-Y₁-Y₂-X₁-X₂-X₃-X₄-Z₁-Z₂-Z₃-Z₄, Z₁-Z₂-Z₃-Z₄-Y₁-Y₂-Y₃-X₁-X₂-Z₁-Z₂-Z₃-Z₄, Z₁-Z₂-Z₃-Z₄-Y₁-Y₂-Y₃-X₁-X₂-X₃-Z₁-Z₂-Z₃-Z₄, Z₁-Z₂-Z₃-Z₄-Y₁-Y₂-Y₃-X₁-X₂-X₃-X₃-X₄-Z₁-Z₂-Z₃-Z₄, Z₁-Z₂-Z₃-Z₄-Y₁-Y₂-Y₃-Y₄-X₁-X₂-Z₁-Z₂-Z₃-Z₄, Z₁-Z₂-Z₃-Z₄-Y₁-Y₂-Y₃-Y₄-X₁-X₂-X₃-Z₁-Z₂-Z₃-Z₄, Z₁-Z₂-Z₃-Z₄-Y₁-Y₂-Y₃-Y₄-X₁-X₂-X₃-X₄-Z₁-Z₂-Z₃-Z₄, Z₁-X₁-X₂-Y₁-Y₂, Z₁-X₁-X₂-X₃-Y₁-Y₂, Z₁-X₁-X₂-X₃-X₄-Y₁-Y₂, Z₁-X₁-X₂-Y₁-Y₂-Y₃, Z₁-X₁-X₂-X₃-Y₁-Y₂-Y₃, Z₁-X₁-X₂-X₃-X₄-Y₁-Y₂-Y₃, Z₁-X₁-X₂-Y₁-Y₂-Y₃-Y₄, Z₁-X₁-X₂-X₃-Y₁-Y₂-Y₃-Y₄, Z₁-X₁-X₂-X₃-X₄-Y₁-Y₂-Y₃-Y₄, Z₁-Z₂-X₁-X₂-Y₁-Y₂, Z₁-Z₂-X₁-X₂-X₃-Y₁-Y₂, Z₁-Z₂-X₁-X₂-X₃-X₄-Y₁-Y₂, Z₁-Z₂-X₁-X₂-Y₁-Y₂-Y₃, Z₁-Z₂-X₁-X₂-X₃-Y₁-Y₂-Y₃, Z₁-Z₂-X₁-X₂-X₃-X₄-Y₁-Y₂-Y₃, Z₁-Z₂-X₁-X₂-Y₁-Y₂-Y₃-Y₄, Z₁-Z₂-X₁-X₂-X₃-Y₁-Y₂-Y₃-Y₄, Z₁-Z₂-X₁-X₂-X₃-X₄-Y₁-Y₂-Y₃-Y₄, Z₁-Z₂-Z₃-X₁-X₂-Y₁-Y₂, Z₁-Z₂-Z₃-X₁-X₂-X₃-Y₁-Y₂, Z₁-Z₂-Z₃-X₁-X₂-X₃-X₄-Y₁-Y₂, Z₁-Z₂-Z₃-X₁-X₂-Y₁-Y₂-Y₃, Z₁-Z₂-Z₃-X₁-X₂-X₃-Y₁-Y₂-Y₃, Z₁-Z₂-Z₃-X₁-X₂-X₃-X₄-Y₁-Y₂-Y₃, Z₁-Z₂-Z₃-X₁-X₂-Y₁-Y₂-Y₃-Y₄, Z₁-Z₂-Z₃-X₁-X₂-X₃-Y₁-Y₂-Y₃-Y₄, Z₁-Z₂-Z₃-X₁-X₂-X₃-X₄-Y₁-Y₂-Y₃-Y₄, Z₁-Z₂-Z₃-Z₄-X₁-X₂-Y₁-Y₂, Z₁-Z₂-Z₃-Z₄-X₁-X₂-X₃-Y₁-Y₂, Z₁-Z₂-Z₃-Z₄-X₁-X₂-X₃-X₄-Y₁-Y₂, Z₁-Z₂-Z₃-Z₄-X₁-X₂-Y₁-Y₂-Y₃, Z₁-Z₂-Z₃-Z₄-X₁-X₂-X₃-Y₁-Y₂-Y₃, Z₁-Z₂-Z₃-Z₄-X₁-X₂-X₃-X₄-Y₁-Y₂-Y₃, Z₁-Z₂-Z₃-Z₄-X₁-X₂-Y₁-Y₂-Y₃-Y₄, Z₁-Z₂-Z₃-Z₄-X₁-X₂-X₃-Y₁-Y₂-Y₃-Y₄, Z₁-Z₂-Z₃-Z₄-X₁-X₂-X₃-X₄-Y₁-Y₂-Y₃-Y₄, Z₁-Y₁-Y₂-X₁-X₂, Z₁-Y₁-Y₂-X₁-X₂-X₃, Z₁-Y₁-Y₂-X₁-X₂-X₃-X₄, Z₁-Y₁-Y₂-Y₃-X₁-X₂, Z₁-Y₁-Y₂-Y₃-X₁-X₂-X₃, Z₁-Y₁-Y₂-Y₃-X₁-X₂-X₃-X₄, Z₁-Y₁-Y₂-Y₃-Y₄-X₁-X₂, Z₁-Y₁-Y₂-Y₃-Y₄-X₁-X₂-X₃, Z₁-Y₁-Y₂-Y₃-Y₄-X₁-X₂-X₃-X₄, Z₁-Z₂-Y₁-Y₂-X₁-X₂, Z₁-Z₂-Y₁-Y₂-X₁-X₂-X₃, Z₁-Z₂-Y₁-Y₂-X₁-X₂-X₃-X₄, Z₁-Z₂-Y₁-Y₂-Y₃-X₁-X₂, Z₁-Z₂-Y₁-Y₂-Y₃-X₁-X₂-X₃, Z₁-Z₂-Y₁-Y₂-Y₃-X₁-X₂-X₃-X₄, Z₁-Z₂-Y₁-Y₂-Y₃-Y₄-X₁-X₂, Z₁-Z₂-Y₁-Y₂-Y₃-Y₄-X₁-X₂-X₃, Z₁-Z₂-Y₁-Y₂-Y₃-Y₄-X₁-X₂-X₃-X₄, Z₁-Z₂-Z₃-Y₁-Y₂-X₁-X₂, Z₁-Z₂-Z₃-Y₁-Y₂-X₁-X₂-X₃, Z₁-Z₂-Z₃-Y₁-Y₂-X₁-X₂-X₃-X₄, Z₁-Z₂-Z₃-Y₁-Y₂-Y₃-X₁-X₂, Z₁-Z₂-Z₃-Y₁-Y₂-Y₃-X₁-X₂-X₃, Z₁-Z₂-Z₃-Y₁-Y₂-Y₃-X₁-X₂-X₃-X₄, Z₁-Z₂-Z₃-Y₁-Y₂-Y₃-Y₄-X₁-X₂, Z₁-Z₂-Z₃-Y₁-Y₂-Y₃-Y₄-X₁-X₂-X₃, Z₁-Z₂-Z₃-Y₁-Y₂-Y₃-Y₄-X₁-X₂-X₃-X₄, Z₁-Z₂-Z₃-Z₄-Y₁-Y₂-X₁-X₂, Z₁-Z₂-Z₃-Z₄-Y₁-Y₂-X₁-X₂-X₃, Z₁-Z₂-Z₃-Z₄-Y₁-Y₂-X₁-X₂-X₃-X₄, Z₁-Z₂-Z₃-Z₄-Y₁-Y₂-Y₃-X₁-X₂, Z₁-Z₂-Z₃-Z₄-Y₁-Y₂-Y₃-X₁-X₂-X₃, Z₁-Z₂-Z₃-Z₄-Y₁-Y₂-Y₃-X₁-X₂-X₃-X₄, Z₁-Z₂-Z₃-Z₄-Y₁-Y₂-Y₃-Y₄-X₁-X₂, Z₁-Z₂-Z₃-Z₄-Y₁-Y₂-Y₃-Y₄-X₁-X₂-X₃, Z₁-Z₂-Z₃-Z₄-Y₁-Y₂-Y₃-Y₄-X₁-X₂-X₃-X₄, X₁-X₂-Y₁-Y₂-Z₁, X₁-X₂-X₃-Y₁-Y₂-Z₁, X₁-X₂-X₃-X₄-Y₁-Y₂-Z₁, X₁-X₂-Y₁-Y₂-Y₃-Z₁, X₁-X₂-X₃-Y₁-Y₂-Y₃-Z₁, X₁-X₂-X₃-X₄-Y₁-Y₂-Y₃-Z₁, X₁-X₂-Y₁-Y₂-Y₃-Y₄-Z₁, X₁-X₂-X₃-Y₁-Y₂-Y₃-Y₄-Z₁, X₁-X₂-X₃-X₄-Y₁-Y₂-Y₃-Y₄-Z₁, X₁-X₂-Y₁-Y₂-Z₁-Z₂, X₁-X₂-X₃-Y₁-Y₂-Z₁-Z₂, X₁-X₂-X₃-X₄-Y₁-Y₂-Z₁-Z₂, X₁-X₂-Y₁-Y₂-Y₃-Z₁-Z₂, X₁-X₂-X₃-Y₁-Y₂-Y₃-Z₁-Z₂, X₁-X₂-X₃-X₄-Y₁-Y₂-Y₃-Z₁-Z₂, X₁-X₂-Y₁-Y₂-Y₃-Y₄-Z₁-Z₂, X₁-X₂-X₃-Y₁-Y₂-Y₃-Y₄-Z₁-Z₂, X₁-X₂-X₃-X₄-Y₁-Y₂-Y₃-Y₄-Z₁-Z₂, X₁-X₂-Y₁-Y₂-Z₁-Z₂-Z₃, X₁-X₂-X₃-Y₁-Y₂-Z₁-Z₂-Z₃, X₁-X₂-X₃-X₄-Y₁-Y₂-Z₁-Z₂-Z₃, X₁-X₂-Y₁-Y₂-Y₃-Z₁-Z₂-Z₃, X₁-X₂-X₃-Y₁-Y₂-Y₃-Z₁-Z₂-Z₃, X₁-X₂-X₃-X₄-Y₁-Y₂-Y₃-Z₁-Z₂-Z₃, X₁-X₂-Y₁-Y₂-Y₃-Y₄-Z₁-Z₂-Z₃, X₁-X₂-X₃-Y₁-Y₂-Y₃-Y₄-Z₁-Z₂-Z₃, X₁-X₂-X₃-X₄-Y₁-Y₂-Y₃-Y₄-Z₁-Z₂-Z₃, X₁-X₂-Y₁-Y₂-Z₁-Z₂-Z₃-Z₄, X₁-X₂-X₃-Y₁-Y₂-Z₁-Z₂-Z₃-Z₄, X₁-X₂-X₃-X₄-Y₁-Y₂-Z₁-Z₂-Z₃-Z₄, X₁-X₂-Y₁-Y₂-Y₃-Z₁-Z₂-Z₃-Z₄, X₁-X₂-X₃-Y₁-Y₂-Y₃-Z₁-Z₂-Z₃-Z₄, X₁-X₂-X₃-X₄-Y₁-Y₂-Y₃-Z₁-Z₂-Z₃-Z₄, X₁-X₂-Y₁-Y₂-Y₃-Y₄-Z₁-Z₂-Z₃-Z₄, X₁-X₂-X₃-Y₁-Y₂-Y₃-Y₄-Z₁-Z₂-Z₃-Z₄, X₁-X₂-X₃-X₄-Y₁-Y₂-Y₃-Y₄-Z₁-Z₂-Z₃-Z₄, Y₁-Y₂-X₁-X₂-Z₁, Y₁-Y₂-X₁-X₂-X₃-Z₁, Y₁-Y₂-X₁-X₂-X₃-X₄-Z₁, Y₁-Y₂-Y₃-X₁-X₂-Z₁, Y₁-Y₂-Y₃-X₁-X₂-X₃-Z₁, Y₁-Y₂-Y₃-X₁-X₂-X₃-X₄-Z₁, Y₁-Y₂-Y₃-Y₄-X₁-X₂-Z₁, Y₁-Y₂-Y₃-Y₄-X₁-X₂-X₃-Z₁, Y₁-Y₂-Y₃-Y₄-X₁-X₂-X₃-X₄-Z₁, Y₁-Y₂-X₁-X₂-Z₁-Z₂, Y₁-Y₂-X₁-X₂-X₃-Z₁-Z₂, Y₁-Y₂-X₁-X₂-X₃-X₄-Z₁-Z₂, Y₁-Y₂-Y₃-X₁-X₂-Z₁-Z₂, Y₁-Y₂-Y₃-X₁-X₂-X₃-Z₁-Z₂, Y₁-Y₂-Y₃-X₁-X₂-X₃-X₄-Z₁-Z₂, Y₁-Y₂-Y₃-Y₄-X₁-X₂-Z₁-Z₂, Y₁-Y₂-Y₃-Y₄-X₁-X₂-X₃-Z₁-Z₂, Y₁-Y₂-Y₃-Y₄-X₁-X₂-X₃-X₄-Z₁-Z₂, Y₁-Y₂-X₁-X₂-Z₁-Z₂-Z₃, Y₁-Y₂-X₁-X₂-X₃-Z₁-Z₂-Z₃, Y₁-Y₂-X₁-X₂-X₃-X₄-Z₁-Z₂-Z₃, Y₁-Y₂-Y₃-X₁-X₂-Z₁-Z₂-Z₃, Y₁-Y₂-Y₃-X₁-X₂-X₃-Z₁-Z₂-Z₃, Y₁-Y₂-Y₃-X₁-X₂-X₃-X₄-Z₁-Z₂-Z₃, Y₁-Y₂-Y₃-Y₄-X₁-X₂-Z₁-Z₂-Z₃, Y₁-Y₂-Y₃-Y₄-X₁-X₂-X₃-Z₁-Z₂-Z₃, Y₁-Y₂-Y₃-Y₄-X₁-X₂-X₃-X₄-Z₁-Z₂-Z₃, Y₁-Y₂-X₁-X₂-Z₁-Z₂-Z₃-Z₄, Y₁-Y₂-X₁-X₂-X₃-Z₁-Z₂-Z₃-Z₄, Y₁-Y₂-X₁-X₂-X₃-X₄-Z₁-Z₂-Z₃-Z₄, Y₁-Y₂-Y₃-X₁-X₂-Z₁-Z₂-Z₃-Z₄, Y₁-Y₂-Y₃-X₁-X₂-X₃-Z₁-Z₂-Z₃-Z₄, Y₁-Y₂-Y₃-X₁-X₂-X₃-X₄-Z₁-Z₂-Z₃-Z₄, Y₁-Y₂-Y₃-Y₄-X₁-X₂-Z₁-Z₂-Z₃-Z₄, Y₁-Y₂-Y₃-Y₄-X₁-X₂-X₃-Z₁-Z₂-Z₃-Z₄, Y₁-Y₂-Y₃-Y₄-X₁-X₂-X₃-X₄-Z₁-Z₂-Z₃-Z₄, Z₁-X₁-X₂-Y₁-Y₂, Z₁-X₁-X₂-X₃-Y₁-Y₂, Z₁-X₁-X₂-X₃-X₄-Y₁-Y₂, Z₁-X₁-X₂-Y₁-Y₂-Y₃, Z₁-X₁-X₂-X₃-Y₁-Y₂-Y₃, Z₁-X₁-X₂-X₃-X₄-Y₁-Y₂-Y₃, Z₁-X₁-X₂-Y₁-Y₂-Y₃-Y₄, Z₁-X₁-X₂-X₃-Y₁-Y₂-Y₃-Y₄, Z₁-X₁-X₂-X₃-X₄-Y₁-Y₂-Y₃-Y₄, Z₁-Z₂-X₁-X₂-Y₁-Y₂, Z₁-Z₂-X₁-X₂-X₃-Y₁-Y₂, Z₁-Z₂-X₁-X₂-X₃-X₄-Y₁-Y₂, Z₁-Z₂-X₁-X₂-Y₁-Y₂-Y₃, Z₁-Z₂-X₁-X₂-X₃-Y₁-Y₂-Y₃, Z₁-Z₂-X₁-X₂-X₃-X₄-Y₁-Y₂-Y₃, Z₁-Z₂-X₁-X₂-Y₁-Y₂-Y₃-Y₄, Z₁-Z₂-X₁-X₂-X₃-Y₁-Y₂-Y₃-Y₄, Z₁-Z₂-X₁-X₂-X₃-X₄-Y₁-Y₂-Y₃-Y₄, Z₁-Z₂-Z₃-X₁-X₂-Y₁-Y₂, Z₁-Z₂-Z₃-X₁-X₂-X₃-Y₁-Y₂, Z₁-Z₂-Z₃-X₁-X₂-X₃-X₄-Y₁-Y₂, Z₁-Z₂-Z₃-X₁-X₂-Y₁-Y₂-Y₃, Z₁-Z₂-Z₃-X₁-X₂-X₃-Y₁-Y₂-Y₃, Z₁-Z₂-Z₃-X₁-X₂-X₃-X₄-Y₁-Y₂-Y₃, Z₁-Z₂-Z₃-X₁-X₂-Y₁-Y₂-Y₃-Y₄, Z₁-Z₂-Z₃-X₁-X₂-X₃-Y₁-Y₂-Y₃-Y₄, Z₁-Z₂-Z₃-X₁-X₂-X₃-X₄-Y₁-Y₂-Y₃-Y₄, Z₁-Z₂-Z₃-Z₄-X₁-X₂-Y₁-Y₂, Z₁-Z₂-Z₃-Z₄-X₁-X₂-X₃-Y₁-Y₂, Z₁-Z₂-Z₃-Z₄-X₁-X₂-X₃-X₄-Y₁-Y₂, Z₁-Z₂-Z₃-Z₄-X₁-X₂-Y₁-Y₂-Y₃, Z₁-Z₂-Z₃-Z₄-X₁-X₂-X₃-Y₁-Y₂-Y₃, Z₁-Z₂-Z₃-Z₄-X₁-X₂-X₃-X₄-Y₁-Y₂-Y₃, Z₁-Z₂-Z₃-Z₄-X₁-X₂-Y₁-Y₂-Y₃-Y₄, Z₁-Z₂-Z₃-Z₄-X₁-X₂-X₃-Y₁-Y₂-Y₃-Y₄, Z₁-Z₂-Z₃-Z₄-X₁-X₂-X₃-X₄-Y₁-Y₂-Y₃-Y₄, X₁-X₂-Y₁-Y₂-Z₁, X₁-X₂-X₃-Y₁-Y₂-Z₁, X₁-X₂-X₃-X₄-Y₁-Y₂-Z₁, X₁-X₂-Y₁-Y₂-Y₃-Z₁, X₁-X₂-X₃-Y₁-Y₂-Y₃-Z₁, X₁-X₂-X₃-X₄-Y₁-Y₂-Y₃-Z₁, X₁-X₂-Y₁-Y₂-Y₃-Y₄-Z₁, X₁-X₂-X₃-Y₁-Y₂-Y₃-Y₄-Z₁, X₁-X₂-X₃-X₄-Y₁-Y₂-Y₃-Y₄-Z₁, Z₁-X₁-X₂-Y₁-Y₂-Z₁, Z₁-X₁-X₂-X₃-Y₁-Y₂-Z₁, Z₁-X₁-X₂-X₃-X₄-Y₁-Y₂-Z₁, Z₁-X₁-X₂-Y₁-Y₂-Y₃-Z₁, Z₁-X₁-X₂-X₃-Y₁-Y₂-Y₃-Z₁, Z₁-X₁-X₂-X₃-X₄-Y₁-Y₂-Y₃-Z₁, Z₁-X₁-X₂-Y₁-Y₂-Y₃-Y₄-Z₁, Z₁-X₁-X₂-X₃-Y₁-Y₂-Y₃-Y₄-Z₁, Z₁-X₁-X₂-X₃-X₄-Y₁-Y₂-Y₃-Y₄-Z₁, Z₁-Z₂-X₁-X₂-Y₁-Y₂-Z₁, Z₁-Z₂-X₁-X₂-X₃-Y₁-Y₂-Z₁, Z₁-Z₂-X₁-X₂-X₃-X₄-Y₁-Y₂-Z₁, Z₁-Z₂-X₁-X₂-Y₁-Y₂-Y₃-Z₁, Z₁-Z₂-X₁-X₂-X₃-Y₁-Y₂-Y₃-Z₁, Z₁-Z₂-X₁-X₂-X₃-X₄-Y₁-Y₂-Y₃-Z₁, Z₁-Z₂-X₁-X₂-Y₁-Y₂-Y₃-Y₄-Z₁, Z₁-Z₂-X₁-X₂-X₃-Y₁-Y₂-Y₃-Y₄-Z₁, Z₁-Z₂-X₁-X₂-X₃-X₄-Y₁-Y₂-Y₃-Y₄-Z₁, Z₁-Z₂-Z₃-X₁-X₂-Y₁-Y₂-Z₁, Z₁-Z₂-Z₃-X₂-X₃-Y₁-Y₂-Z₁, Z₁-Z₂-Z₃-X₁-X₂-X₃-X₄-Y₁-Y₂-Z₁, Z₁-Z₂-Z₃-X₁-X₂-Y₁-Y₂-Y₃-Z₁, Z₁-Z₂-Z₃-X₁-X₂-X₃-Y₁-Y₂-Y₃-Z₁, Z₁-Z₂-Z₃-X₁-X₂-X₃-X₄-Y₁-Y₂-Y₃-Z₁, Z₁-Z₂-Z₃-X₁-X₂-Y₁-Y₂-Y₃-Y₄-Z₁, Z₁-Z₂-Z₃-X₁-X₂-X₃-Y₁-Y₂-Y₃-Y₄-Z₁, Z₁-Z₂-Z₃-X₁-X₂-X₃-X₄-Y₁-Y₂-Y₃-Y₄-Z₁, Z₁-Z₂-Z₃-Z₄-X₁-X₂-Y₁-Y₂-Z₁, Z₁-Z₂-Z₃-Z₄-X₁-X₂-X₃-Y₁-Y₂-Z₁, Z₁-Z₂-Z₃-Z₄-X₁-X₂-X₃-X₄-Y₁-Y₂-Z₁, Z₁-Z₂-Z₃-Z₄-X₁-X₂-Y₁-Y₂-Y₃-Z₁, Z₁-Z₂-Z₃-Z₄-X₁-X₂-X₃-Y₁-Y₂-Y₃-Z₁, Z₁-Z₂-Z₃-Z₄-X₁-X₂-X₃-X₄-Y₁-Y₂-Y₃-Z₁, Z₁-Z₂-Z₃-Z₄-X₁-X₂-Y₁-Y₂-Y₃-Y₄-Z₁, Z₁-Z₂-Z₃-Z₄-X₁-X₂-X₃-Y₁-Y₂-Y₃-Y₄-Z₁, Z₁-Z₂-Z₃-Z₄-X₁-X₂-X₃-X₄-Y₁-Y₂-Y₃-Y₄-Z₁, X₁-X₂-Y₁-Y₂-Z₁-Z₂, X₁-X₂-X₃-Y₁-Y₂-Z₁-Z₂, X₁-X₂-X₃-X₄-Y₁-Y₂-Z₁-Z₂, X₁-X₂-Y₁-Y₂-Y₃-Z₁-Z₂, X₁-X₂-X₃-Y₁-Y₂-Y₃-Z₁-Z₂, X₁-X₂-X₃-X₄-Y₁-Y₂-Y₃-Z₁-Z₂, X₁-X₂-Y₁-Y₂-Y₃-Y₄-Z₁-Z₂, X₁-X₂-X₃-Y₁-Y₂-Y₃-Y₄-Z₁-Z₂, X₁-X₂-X₃-X₄-Y₁-Y₂-Y₃-Y₄-Z₁-Z₂, Z₁-X₁-X₂-Y₁-Y₂-Z₁-Z₂, Z₁-X₁-X₂-X₃-Y₁-Y₂-Z₁-Z₂, Z₁-X₁-X₂-X₃-X₄-Y₁-Y₂-Z₁-Z₂, Z₁-X₁-X₂-Y₁-Y₂-Y₃-Z₁-Z₂, Z₁-X₁-X₂-X₃-Y₁-Y₂-Y₃-Z₁-Z₂, Z₁-X₁-X₂-X₃-X₄-Y₁-Y₂-Y₃-Z₁-Z₂, Z₁-X₁-X₂-Y₁-Y₂-Y₃-Y₄-Z₁-Z₂, Z₁-X₁-X₂-X₃-Y₁-Y₂-Y₃-Y₄-Z₁-Z₂, Z₁-X₁-X₂-X₃-X₄-Y₁-Y₂-Y₃-Y₄-Z₁-Z₂, Z₁-Z₂-X₁-X₂-Y₁-Y₂-Z₁-Z₂, Z₁-Z₂-X₁-X₂-X₃-Y₁-Y₂-Z₁-Z₂, Z₁-Z₂-X₁-X₂-X₃-X₄-Y₁-Y₂-Z₁-Z₂, Z₁-Z₂-X₁-X₂-Y₁-Y₂-Y₃-Z₁-Z₂, Z₁-Z₂-X₁-X₂-X₃-Y₁-Y₂-Y₃-Z₁-Z₂, Z₁-Z₂-X₁-X₂-X₃-X₄-Y₁-Y₂-Y₃-Z₁-Z₂, Z₁-Z₂-X₁-X₂-Y₁-Y₂-Y₃-Y₄-Z₁-Z₂, Z₁-Z₂-X₁-X₂-X₃-Y₁-Y₂-Y₃-Y₄-Z₁-Z₂, Z₁-Z₂-X₁-X₂-X₃-X₄-Y₁-Y₂-Y₃-Y₄-Z₁-Z₂, Z₁-Z₂-Z₃-X₁-X₂-Y₁-Y₂-Z₁-Z₂, Z₁-Z₂-Z₃-X₁-X₂-X₃-Y₁-Y₂-Z₁-Z₂, Z₁-Z₂-Z₃-X₁-X₂-X₃-X₄-Y₁-Y₂-Z₁-Z₂, Z₁-Z₂-Z₃-X₁-X₂-Y₁-Y₂-Y₃-Z₁-Z₂, Z₁-Z₂-Z₃-X₁-X₂-X₃-Y₁-Y₂-Y₃-Z₁-Z₂, Z₁-Z₂-Z₃-X₁-X₂-X₃-X₄-Y₁-Y₂-Y₃-Z₁-Z₂, Z₁-Z₂-Z₃-X₁-X₂-Y₁-Y₂-Y₃-Y₄-Z₁-Z₂, Z₁-Z₂-Z₃-X₁-X₂-X₃-Y₁-Y₂-Y₃-Y₄-Z₁-Z₂, Z₁-Z₂-Z₃-X₁-X₂-X₃-X₄-Y₁-Y₂-Y₃-Y₄-Z₁-Z₂, Z₁-Z₂-Z₃-Z₄-X₁-X₂-Y₁-Y₂-Z₁-Z₂, Z₁-Z₂-Z₃-Z₄-X₁-X₂-X₃-Y₁-Y₂-Z₁-Z₂, Z₁-Z₂-Z₃-Z₄-X₁-X₂-X₃-X₄-Y₁-Y₂-Z₂, Z₁-Z₂-Z₃-Z₄-X₁-X₂-X₃-X₄-Y₁-Y₂-Z₁-Z₂, Z₁-Z₂-Z₃-Z₄-X₁-X₂-Y₁-Y₂-Y₃-Z₁-Z₂, Z₁-Z₂-Z₃-Z₄-X₁-X₂-X₃-Y₁-Y₂-Y₃-Z₁-Z₂, Z₁-Z₂-Z₃-Z₄-X₁-X₂-X₃-X₄-Y₁-Y₂-Y₃-Z₁-Z₂, Z₁-Z₂-Z₃-Z₄-X₁-X₂-Y₁-Y₂-Y₃-Y₄-Z₁-Z₂, Z₁-Z₂-Z₃-Z₄-X₁-X₂-X₃-Y₁-Y₂-Y₃-Y₄-Z₁-Z₂, Z₁-Z₂-Z₃-Z₄-X₁-X₂-X₃-X₄-Y₁-Y₂-Y₃-Y₄-Z₁-Z₂, X₁-X₂-Y₁-Y₂-Z₁-Z₂-Z₃, X₁-X₂-X₃-Y₁-Y₂-Z₁-Z₂-Z₃, X₁-X₂-X₃-X₄-Y₁-Y₂-Z₁-Z₂-Z₃, X₁-X₂-Y₁-Y₂-Y₃-Z₁-Z₂-Z₃, X₁-X₂-X₃-Y₁-Y₂-Y₃-Z₁-Z₂-Z₃, X₁-X₂-X₃-X₄-Y₁-Y₂-Y₃-Z₁-Z₂-Z₃, X₁-X₂-Y₁-Y₂-Y₃-Y₄-Z₁-Z₂-Z₃, X₁-X₂-X₃-Y₁-Y₂-Y₃-Y₄-Z₁-Z₂-Z₃, X₁-X₂-X₃-X₄-Y₁-Y₂-Y₃-Y₄-Z₁-Z₂-Z₃, Z₁-X₁-X₂-Y₁-Y₂-Z₁-Z₂-Z₃, Z₁-X₁-X₂-X₃-Y₁-Y₂-Z₁-Z₂-Z₃, Z₁-X₁-X₂-X₃-X₄-Y₁-Y₂-Z₁-Z₂-Z₃, Z₁-X₁-X₂-Y₁-Y₂-Y₃-Z₁-Z₂-Z₃, Z₁-X₁-X₂-X₃-Y₁-Y₂-Y₃-Z₁-Z₂-Z₃, Z₁-X₁-X₂-X₃-X₄-Y₁-Y₃-Z₁-Z₂-Z₃, Z₁-X₁-X₂-Y₁-Y₂-Y₃-Y₄-Z₁-Z₂-Z₃, Z₁-X₁-X₂-X₃-Y₁-Y₂-Y₃-Y₄-Z₁-Z₂-Z₃, Z₁-X₁-X₂-X₃-X₄-Y₁-Y₂-Y₃-Y₄-Z₁-Z₂-Z₃, Z₁-Z₂-X₁-X₂-Y₁-Y₂-Z₁-Z₂-Z₃, Z₁-Z₂-X₁-X₂-X₃-Y₁-Y₂-Z₁-Z₂-Z₃, Z₁-Z₂-X₁-X₂-X₃-X₄-Y₁-Y₂-Z₁-Z₂-Z₃, Z₁-Z₂-X₁-X₂-Y₁-Y₂-Y₃-Z₁-Z₂-Z₃, Z₁-Z₂-X₁-X₂-X₃-Y₁-Y₂-Y₃-Z₁-Z₂-Z₃, Z₁-Z₂-X₁-X₂-X₃-X₄-Y₁-Y₂-Y₃-Z₁-Z₂-Z₃, Z₁-Z₂-X₁-X₂-Y₁-Y₂-Y₃-Y₄-Z₁-Z₂-Z₃, Z₁-Z₂-X₁-X₂-X₃-Y₁-Y₂-Y₃-Y₄-Z₁-Z₂-Z₃, Z₁-Z₂-X₁-X₂-X₃-X₄-Y₁-Y₂-Y₃-Y₄-Z₁-Z₂-Z₃, Z₁-Z₂-Z₃-X₁-X₂-Y₁-Y₂-Z₁-Z₂-Z₃, Z₁-Z₂-Z₃-X₁-X₂-X₃-Y₁-Y₂-Z₁-Z₂-Z₃, Z₁-Z₂-Z₃-X₁-X₂-X₃-X₄-Y₁-Y₂-Z₁-Z₂-Z₃, Z₁-Z₂-Z₃-X₁-X₂-Y₁-Y₂-Y₃-Z₁-Z₂-Z₃, Z₁-Z₂-Z₃-X₁-X₂-X₃-Y₁-Y₂-Y₃-Z₁-Z₂-Z₃, Z₁-Z₂-Z₃-X₁-X₂-X₃-X₄-Y₁-Y₂-Y₃-Z₁-Z₂-Z₃, Z₁-Z₂-Z₃-X₁-X₂-Y₁-Y₂-Y₃-Y₄-Z₁-Z₂-Z₃, Z₁-Z₂-Z₃-X₁-X₂-X₃-Y₁-Y₂-Y₃-Y₄-Z₁-Z₂-Z₃, Z₁-Z₂-Z₃-X₁-X₂-X₃-X₄-Y₁-Y₂-Y₃-Y₄-Z₁-Z₂-Z₃, Z₁-Z₂-Z₃-Z₄-X₁-X₂-Y₁-Y₂-Z₁-Z₂-Z₃, Z₁-Z₂-Z₃-Z₄-X₁-X₂-X₃-Y₁-Y₂-Z₁-Z₂-Z₃, Z₁-Z₂-Z₃-Z₄-X₁-X₂-X₃-X₄-Y₁-Y₂-Z₁-Z₂-Z₃, Z₁-Z₂-Z₃-Z₄-X₁-X₂-Y₁-Y₂-Y₃-Z₁-Z₂-Z₃, Z₁-Z₂-Z₃-Z₄-X₁-X₂-X₃-Y₁-Y₂-Y₃-Z₁-Z₂-Z₃, Z₁-Z₂-Z₃-Z₄-X₁-X₂-X₃-X₄-Y₁-Y₂-Y₃-Z₁-Z₂-Z₃, Z₁-Z₂-Z₃-Z₄-X₁-X₂-Y₁-Y₂-Y₃-Y₄-Z₁-Z₂-Z₃, Z₁-Z₂-Z₃-Z₄-X₁-X₂-X₃-Y₁-Y₂-Y₃-Y₄-Z₁-Z₂-Z₃, Z₁-Z₂-Z₃-Z₄-X₁-X₂-X₃-X₄-Y₁-Y₂-Y₃-Y₄-Z₁-Z₂-Z₃, X₁-X₂-Y₁-Y₂-Z₁-Z₂-Z₃-Z₄, X₁-X₂-X₃-Y₁-Y₂-Z₁-Z₂-Z₃-Z₄, X₁-X₂-X₃-X₄-Y₁-Y₂-Z₁-Z₂-Z₃-Z₄, X₁-X₂-Y₁-Y₂-Y₃-Z₁-Z₂-Z₃-Z₄, X₁-X₂-X₃-Y₁-Y₂-Y₃-Z₁-Z₂-Z₃-Z₄, X₁-X₂-X₃-X₄-Y₁-Y₂-Y₃-Z₁-Z₂-Z₃-Z₄, X₁-X₂-Y₁-Y₂-Y₃-Y₄-Z₁-Z₂-Z₃-Z₄, X₁-X₂-X₃-Y₁-Y₂-Y₃-Y₄-Z₁-Z₂-Z₃-Z₄, X₁-X₂-X₃-X₄-Y₁-Y₂-Y₃-Y₄-Z₁-Z₂-Z₃-Z₄, Z₁-X₁-X₂-Y₁-Y₂-Z₁-Z₂-Z₃-Z₄, Z₁-X₁-X₂-X₃-Y₁-Y₂-Z₁-Z₂-Z₃-Z₄, Z₁-X₁-X₂-X₃-X₄-Y₁-Y₂-Z₁-Z₂-Z₃-Z₄, Z₁-X₁-X₂-Y₁-Y₂-Y₃-Z₁-Z₂-Z₃-Z₄, Z₁-X₁-X₂-X₃-Y₁-Y₂-Y₃-Z₁-Z₂-Z₃-Z₄, Z₁-X₁-X₂-X₃-X₄-Y₁-Y₂-Y₃-Z₁-Z₂-Z₃-Z₄, Z₁-X₁-X₂-Y₁-Y₂-Y₃-Y₄-Z₁-Z₂-Z₃-Z₄, Z₁-X₁-X₂-X₃-Y₁-Y₂-Y₃-Y₄-Z₁-Z₂-Z₃-Z₄, Z₁-X₁-X₂-X₃-X₄-Y₁-Y₂-Y₃-Y₄-Z₁-Z₂-Z₃-Z₄, Z₁-Z₂-X₁-X₂-Y₁-Y₂-Z₁-Z₂-Z₃-Z₄, Z₁-Z₂-X₁-X₂-X₃-Y₁-Y₂-Z₁-Z₂-Z₃-Z₄, Z₁-Z₂-X₁-X₂-X₃-X₄-Y₁-Y₂-Z₁-Z₂-Z₃-Z₄, Z₁-Z₂-X₁-X₂-Y₁-Y₂-Y₃-Z₁-Z₂-Z₃-Z₄, Z₁-Z₂-X₁-X₂-X₃-Y₁-Y₂-Y₃-Z₁-Z₂-Z₃-Z₄, Z₁-Z₂-X₁-X₂-X₃-X₄-Y₁-Y₂-Y₃-Z₁-Z₂-Z₃-Z₄, Z₁-Z₂-X₁-X₂-Y₁-Y₂-Y₃-Y₄-Z₁-Z₂-Z₃-Z₄, Z₁-Z₂-X₁-X₂-X₃-Y₁-Y₂-Y₃-Y₄-Z₁-Z₂-Z₃-Z₄, Z₁-Z₂-X₁-X₂-X₃-X₄-Y₁-Y₂-Y₃-Y₄-Z₁-Z₂-Z₃-Z₄, Z₁-Z₂-Z₃-X₁-X₂-Y₁-Y₂-Z₁-Z₂-Z₃-Z₄, Z₁-Z₂-Z₃-X₁-X₂-X₃-Y₁-Y₂-Z₁-Z₂-Z₃-Z₄, Z₁-Z₂-Z₃-X₁-X₂-X₃-X₄-Y₁-Y₂-Z₁-Z₂-Z₃-Z₄, Z₁-Z₂-Z₃-X₁-X₂-Y₁-Y₂-Y₃-Z₁-Z₂-Z₃-Z₄, Z₁-Z₂-Z₃-X₁-X₂-X₃-Y₁-Y₂-Y₃-Z₁-Z₂-Z₃-Z₄, Z₁-Z₂-Z₃-X₁-X₂-X₃-X₄-Y₁-Y₂-Y₃-Z₁-Z₂-Z₃-Z₄, Z₁-Z₂-Z₃-X₁-X₂-Y₁-Y₂-Y₃-Y₄-Z₁-Z₂-Z₃-Z₄, Z₁-Z₂-Z₃-X₁-X₂-X₃-Y₁-Y₂-Y₃-Y₄-Z₁-Z₂-Z₃-Z₄, Z₁-Z₂-Z₃-X₁-X₂-X₃-X₄-Y₁-Y₂-Y₃-Y₄-Z₁-Z₂-Z₃-Z₄, Z₁-Z₂-Z₃-Z₄-X₁-X₂-Y₁-Y₂-Z₁-Z₂-Z₃-Z₄, Z₁-Z₂-Z₃-Z₄-X₁-X₂-X₃-Y₁-Y₂-Z₁-Z₂-Z₃-Z₄, Z₁-Z₂-Z₃-Z₄-X₁-X₂-X₃-X₄-Y₁-Y₂-Z₁-Z₂-Z₃-Z₄, Z₁-Z₂-Z₃-Z₄-X₁-X₂-Y₁-Y₂-Y₃-Z₁-Z₂-Z₃-Z₄, Z₁-Z₂-Z₃-Z₄-X₁-X₂-X₃-Y₁-Y₂-Y₃-Z₁-Z₂-Z₃-Z₄, Z₁-Z₂-Z₃-Z₄-X₁-X₂-X₃-X₄-Y₁-Y₂-Y₃-Z₁-Z₂-Z₃-Z₄, Z₁-Z₂-Z₃-Z₄-X₁-X₂-Y₁-Y₂-Y₃-Y₄-Z₁-Z₂-Z₃-Z₄, Z₁-Z₂-Z₃-Z₄-X₁-X₂-X₃-Y₁-Y₂-Y₃-Y₄-Z₁-Z₂-Z₃-Z₄, Z₁-Z₂-Z₃-Z₄-X₁-X₂-X₃-X₄-Y₁-Y₂-Y₃-Y₄-Z₁-Z₂-Z₃-Z₄, Z₁-Y₁-Y₂-X₁-X₂, Z₁-Y₁-Y₂-X₁-X₂-X₃, Z₁-Y₁-Y₂-X₁-X₂-X₃-X₄, Z₁-Y₁-Y₂-Y₃-X₁-X₂, Z₁-Y₁-Y₂-Y₃-X₁-X₂-X₃, Z₁-Y₁-Y₂-Y₃-X₁-X₂-X₃-X₄, Z₁-Y₁-Y₂-Y₃-Y₄-X₁-X₂, Z₁-Y₁-Y₂-Y₃-Y₄-X₁-X₂-X₃, Z₁-Y₁-Y₂-Y₃-Y₄-X₁-X₂-X₃-X₄, Z₁-Z₂-Y₁-Y₂-X₁-X₂, Z₁-Z₂-Y₁-Y₂-X₁-X₂-X₃, Z₁-Z₂-Y₁-Y₂-X₁-X₂-X₃-X₄, Z₁-Z₂-Y₁-Y₂-Y₃-X₁-X₂, Z₁-Z₂-Y₁-Y₂-Y₃-X₁-X₂-X₃, Z₁-Z₂-Y₁-Y₂-Y₃-X₁-X₂-X₃-X₄, Z₁-Z₂-Y₁-Y₂-Y₃-Y₄-X₁-X₂, Z₁-Z₂-Y₁-Y₂-Y₃-Y₄-X₁-X₂-X₃, Z₁-Z₂-Y₁-Y₂-Y₃-Y₄-X₁-X₂-X₃-X₄, Z₁-Z₂-Z₃-Y₁-Y₂-X₁-X₂, Z₁-Z₂-Z₃-Y₁-Y₂-X₁-X₂-X₃, Z₁-Z₂-Z₃-Y₁-Y₂-X₁-X₂-X₃-X₄, Z₁-Z₂-Z₃-Y₁-Y₂-Y₃-X₁-X₂, Z₁-Z₂-Z₃-Y₁-Y₂-Y₃-X₁-X₂-X₃, Z₁-Z₂-Z₃-Y₁-Y₂-Y₃-X₁-X₂-X₃-X₄, Z₁-Z₂-Z₃-Y₁-Y₂-Y₃-Y₄-X₁-X₂, Z₁-Z₂-Z₃-Y₁-Y₂-Y₃-Y₄-X₁-X₂-X₃, Z₁-Z₂-Z₃-Y₁-Y₂-Y₃-Y₄-X₁-X₂-X₃-X₄, Z₁-Z₂-Z₃-Z₄-Y₁-Y₂-X₁-X₂, Z₁-Z₂-Z₃-Z₄-Y₁-Y₂-X₁-X₂-X₃, Z₁-Z₂-Z₃-Z₄-Y₁-Y₂-X₁-X₂-X₃-X₄, Z₁-Z₂-Z₃-Z₄-Y₁-Y₂-Y₃-X₁-X₂, Z₁-Z₂-Z₃-Z₄-Y₁-Y₂-Y₃-X₁-X₂-X₃, Z₁-Z₂-Z₃-Z₄-Y₁-Y₂-Y₃-X₁-X₂-X₃-X₄, Z₁-Z₂-Z₃-Z₄-Y₁-Y₂-Y₃-Y₄-X₁-X₂, Z₁-Z₂-Z₃-Z₄-Y₁-Y₂-Y₃-Y₄-X₁-X₂-X₃, Z₁-Z₂-Z₃-Z₄-Y₁-Y₂-Y₃-Y₄-X₁-X₂-X₃-X₄, Y₁-Y₂-X₁-X₂-Z, Y₁-Y₂-X₁-X₂-X₃-Z₁, Y₁-Y₂-X₁- X₂-X₃-X₄-Z₁, Y₁-Y₂-Y₃-X₁-X₂-Z₁, Y₁-Y₂-Y₃-X₁-X₂-X₃-Z₁, Y₁-Y₂-Y₃-X₁-X₂-X₃-X₄-Z₁, Y₁-Y₂-Y₃-Y₄-X₁-X₂-Z₁, Y₁-Y₂-Y₃-Y₄-X₁-X₂-X₃-Z₁, Y₁-Y₂-Y₃-Y₄-X₁-X₂-X₃-X₄-Z₁, Z₁-Y₁-Y₂-X₁-X₂-Z₁, Z₁-Y₁-Y₂-X₁-X₂-X₃-Z₁, Z₁-Y₁-Y₂-X₁-X₂-X₃-X₄-Z₁, Z₁-Y₁-Y₂-Y₃-X₁-X₂-Z₁, Z₁-Y₁-Y₂-Y₃-X₁-X₂-X₃-Z₁, Z₁-Y₁-Y₂-Y₃-X₁-X₂-X₃-X₄-Z₁, Z₁-Y₁-Y₂-Y₃-Y₄-X₁-X₂-Z₁, Z₁-Y₁-Y₂-Y₃-Y₄-X₁-X₂-X₃-Z₁, Z₁-Y₁-Y₂-Y₃-Y₄-X₁-X₂-X₃-X₄-Z₁, Z₁-Z₂-Y₁-Y₂-X₁-X₂-Z₁, Z₁-Z₂-Y₁-Y₂-X₁-X₂-X₃-Z₁, Z₁-Z₂-Y₁-Y₂-X₁-X₂-X₃-X₄-Z₁, Z₁-Z₂-Y₁-Y₂-Y₃-X₁-X₂-Z₁, Z₁-Z₂-Y₁-Y₂-Y₃-X₁-X₂-X₃-Z₁, Z₁-Z₂-Y₁-Y₂-Y₃-X₁-X₂-X₃-X₄-Z₁, Z₁-Z₂-Y₁-Y₂-Y₃-Y₄-X₁-X₂-Z₁, Z₁-Z₂-Y₁-Y₂-Y₃-Y₄-X₁-X₂-X₃-Z₁, Z₁-Z₂-Y₁-Y₂-Y₃-Y₄-X₁-X₂-X₃-X₄-Z₁, Z₁-Z₂-Z₃-Y₁-Y₂-X₁-X₂-Z₁, Z₁-Z₂-Z₃-Y₁-Y₂-X₁-X₂-X₃-Z₁, Z₁-Z₂-Z₃-Y₁-Y₂-X₁-X₂-X₂-X₃-X₄-Z₁, Z₁-Z₂-Z₃-Y₁-Y₂-Y₃-X₁-X₂-Z₁, Z₁-Z₂-Z₃-Y₁-Y₂-Y₃-X₁-X₂-X₃-Z₁, Z₁-Z₂-Z₃-Y₁-Y₂-Y₃-X₁-X₂-X₃-X₄-Z₁, Z₁-Z₂-Z₃-Y₁-Y₂-Y₃-Y₄-X₁-X₂-Z₁, Z₁-Z₂-Z₃-Y₁-Y₂-Y₃-Y₄-X₁-X₂-X₃-Z₁, Z₁-Z₂-Z₃-Y₁-Y₂-Y₃-Y₄-X₁-X₂-X₃-X₄-Z₁, Z₁-Z₂-Z₃-Z₄-Y₁-Y₂-X₁-X₂-Z₁, Z₁-Z₂-Z₃-Z₄-Y₁-Y₂-X₁-X₂-X₃-Z₁, Z₁-Z₂-Z₃-Z₄-Y₁-Y₂-X₁-X₂-X₃-X₄-Z₁, Z₁-Z₂-Z₃-Z₄-Y₁-Y₂-Y₃-X₁-X₂-Z₁, Z₁-Z₂-Z₃-Z₄-Y₁-Y₂-Y₃-X₁-X₂-X₃-Z₁, Z₁-Z₂-Z₃-Z₄-Y₁-Y₂-Y₃-X₁-X₂-X₃-X₄-Z₁, Z₁-Z₂-Z₃-Z₄-Y₁-Y₂-Y₃-Y₄-X₁-X₂-Z₁, Z₁-Z₂-Z₃-Z₄-Y₁-Y₂-Y₃-Y₄-X₁-X₂-X₃-Z₁, Z₁-Z₂-Z₃-Z₄-Y₁-Y₂-Y₃-Y₄-X₁-X₂-X₃-X₄-Z₁, Y₁-Y₂-X₁-X₂-Z₁-Z₂, Y₁-Y₂-X₁-X₂-X₃-Z₁-Z₂, Y₁-Y₂-X₁-X₂-X₃-X₄-Z₁-Z₂, Y₁-Y₂-Y₃-X₁-X₂-Z₁-Z₂, Y₁-Y₂-Y₃-X₁-X₂-X₃-Z₁-Z₂, Y₁-Y₂-Y₃-X₁-X₂-X₃-X₄-Z₁-Z₂, Y₁-Y₂-Y₃-Y₄-X₁-X₂-Z₁-Z₂, Y₁-Y₂-Y₃-Y₄-X₁-X₂-X₃-Z₁-Z₂, Y₁-Y₂-Y₃-Y₄-X₁-X₂-X₃-X₄-Z₁-Z₂, Z₁-Y₁-Y₂-X₁-X₂-Z₁-Z₂, Z₁-Y₁-Y₂-X₁-X₂-X₃-Z₁-Z₂, Z₁-Y₁-Y₂-X₁-X₂-X₃-X₄-Z₁-Z₂, Z₁-Y₁-Y₂-Y₃-X₁-X₂-Z₁-Z₂, Z₁-Y₁-Y₂-Y₃-X₁-X₂-X₃-Z₁-Z₂, Z₁-Y₁-Y₂-Y₃-X₁-X₂-X₃-X₄-Z₁-Z₂, Z₁-Y₁-Y₂-Y₃-Y₄-X₁-X₂-Z₁-Z₂, Z₁-Y₁-Y₂-Y₃-Y₄-X₁-X₂-X₃-Z₁-Z₂, Z₁-Y₁-Y₂-Y₃-Y₄-X₁-X₂-X₃-X₄-Z₁-Z₂, Z₁-Z₂-Y₁-Y₂-X₁-X₂-Z₁-Z₂, Z₁-Z₂-Y₁-Y₂-X₁-X₂-X₃-Z₁-Z₂, Z₁-Z₂-Y₁-Y₂-X₁-X₂-X₃-X₄-Z₁-Z₂, Z₁-Z₂-Y₁-Y₂-Y₃-X₁-X₂-Z₁-Z₂, Z₁-Z₂-Y₁-Y₂-Y₃-X₁-X₂-X₃-Z₁-Z₂, Z₁-Z₂-Y₁-Y₂-Y₃-X₁-X₂-X₃-X₄-Z₁-Z₂, Z₁-Z₂-Y₁-Y₂-Y₃-Y₄-X₁-X₂-Z₁-Z₂, Z₁-Z₂-Y₁-Y₂-Y₃-Y₄-X₁-X₂-X₃-Z₁-Z₂, Z₁-Z₂-Y₁-Y₂-Y₃-Y₄-X₁-X₂-X₃-X₄-Z₁-Z₂, Z₁-Z₂-Z₃-Y₁-Y₂-X₁-X₂-Z₁-Z₂, Z₁-Z₂-Z₃-Y₁-Y₂-X₁-X₂-X₃-Z₁-Z₂, Z₁-Z₂-Z₃-Y₁-Y₂-X₁-X₂-X₃-X₄-Z₁-Z₂, Z₁-Z₂-Z₃-Y₁-Y₂-Y₃-X₁-X₂-Z₁-Z₂, Z₁-Z₂-Z₃-Y₁-Y₂-Y₃-X₁-X₂-X₃-Z₁-Z₂, Z₁-Z₂-Z₃-Y₁-Y₂-Y₃-X₁-X₂-X₃-X₄-Z₁-Z₂, Z₁-Z₂-Z₃-Y₁-Y₂-Y₃-Y₄-X₁-X₂-Z₁-Z₂, Z₁-Z₂-Z₃-Y₁-Y₂-Y₃-Y₄-X₁-X₂-X₃-Z₁-Z₂, Z₁-Z₂-Z₃-Y₁-Y₂-Y₃-Y₄-X₁-X₂-X₃-X₄-Z₁-Z₂, Z₁-Z₂-Z₃-Z₄-Y₁-Y₂-X₁-X₂-Z₁-Z₂, Z₁-Z₂-Z₃-Z₄-Y₁-Y₂-X₁-X₂-X₃-Z₁-Z₂, Z₁-Z₂-Z₃-Z₄-Y₁-Y₂-X₁-X₂-X₃-X₄-Z₁-Z₂, Z₁-Z₂-Z₃-Z₄-Y₁-Y₂-Y₃-X₁-X₂-Z₁-Z₂, Z₁-Z₂-Z₃-Z₄-Y₁-Y₂-Y₃-X₁-X₂-X₃-Z₁-Z₂, Z₁-Z₂-Z₃-Z₄-Y₁-Y₂-Y₃-X₁-X₂-X₃-X₄-Z₁-Z₂, Z₁-Z₂-Z₃-Z₄-Y₁-Y₂-Y₃-Y₄-X₁-X₂-Z₁-Z₂, Z₁-Z₂-Z₃-Z₄-Y₁-Y₂-Y₃-Y₄-X₁-X₂-X₃-Z₁-Z₂, Z₁-Z₂-Z₃-Z₄-Y₁-Y₂-Y₃-Y₄-X₁-X₂-X₃-X₄-Z₁-Z₂, Y₁-Y₂-X₁-X₂-Z₁-Z₂-Z₃, Y₁-Y₂-X₁-X₂-X₃-Z₁-Z₂-Z₃, Y₁-Y₂-X₁-X₂-X₃-X₄-Z₁-Z₂-Z₃, Y₁-Y₂-Y₃-X₁-X₂-Z₁-Z₂-Z₃, Y₁-Y₂-Y₃-X₁-X₂-X₃-Z₁-Z₂-Z₃, Y₁-Y₂-Y₃-X₁-X₂-X₃-X₄-Z₁-Z₂-Z₃, Y₁-Y₂-Y₃-Y₄-X₁-X₂-Z₁-Z₂-Z₃, Y₁-Y₂-Y₃-Y₄-X₁-X₂-X₃-Z₁-Z₂-Z₃, Y₁-Y₂-Y₃-Y₄-X₁-X₂-X₃-X₄-Z₁-Z₂-Z₃, Z₁-Y₁-Y₂-X₁-X₂-Z₁-Z₂-Z₃, Z₁-Y₁-Y₂-X₁-X₂-X₃-Z₁-Z₂-Z₃, Z₁-Y₁-Y₂-X₁-X₂-X₃-X₄-Z₁-Z₂-Z₃, Z₁-Y₁-Y₂-Y₃-X₁-X₂-Z₁-Z₂-Z₃, Z₁-Y₁-Y₂-Y₃-X₁-X₂-X₃-Z₁-Z₂-Z₃, Z₁-Y₁-Y₂-Y₃-X₁-X₂-X₃-X₄-Z₁-Z₂-Z₃, Z₁-Y₁-Y₂-Y₃-Y₄-X₁-X₂-Z₁-Z₂-Z₃, Z₁-Y₁-Y₂-Y₃-Y₄-X₁-X₂-X₃-Z₁-Z₂-Z₃, Z₁-Y₁-Y₂-Y₃-Y₄-X₁-X₂-X₃-X₄-Z₁-Z₂-Z₃, Z₁-Z₂-Y₁-Y₂-X₁-X₂-Z₁-Z₂-Z₃, Z₁-Z₂-Y₁-Y₂-X₁-X₂-X₃-Z₁-Z₂-Z₃, Z₁-Z₂-Y₁-Y₂-X₁-X₂-X₃-X₄-Z₁-Z₂-Z₃, Z₁-Z₂-Y₁-Y₂-Y₃-X₁-X₂-Z₁-Z₂-Z₃, Z₁-Z₂-Y₁-Y₂-Y₃-X₁-X₂-X₃-Z₁-Z₂-Z₃, Z₁-Z₂-Y₁-Y₂-Y₃-X₁-X₂-X₃-X₄-Z₁-Z₂-Z₃, Z₁-Z₂-Y₁-Y₂-Y₃-Y₄-X₁-X₂-Z₁-Z₂-Z₃, Z₁-Z₂-Y₁-Y₂-Y₃-Y₄-X₁-X₂-X₃-Z₁-Z₂-Z₃, Z₁-Z₂-Y₁-Y₂-Y₃-Y₄-X₁-X₂-X₃-X₄-Z₁-Z₂-Z₃, Z₁-Z₂-Z₃-Y₁-Y₂-X₁-X₂-Z₁-Z₂-Z₃, Z₁-Z₂-Z₃-Y₁-Y₂-X₁-X₂-X₃-Z₁-Z₂-Z₃, Z₁-Z₂-Z₃-Y₁-Y₂-X₁-X₂-X₃-X₄-Z₁-Z₂-Z₃, Z₁-Z₂-Z₃-Y₁-Y₂-Y₃-X₁-X₂-Z₁-Z₂-Z₃, Z₁-Z₂-Z₃-Y₁-Y₂-Y₃-X₁-X₂-X₃-Z₁-Z₂-Z₃, Z₁-Z₂-Z₃-Y₁-Y₂-Y₃-X₁-X₂-X₃-X₄-Z₁-Z₂-Z₃, Z₁-Z₂-Z₃-Y₁-Y₂-Y₃-Y₄-X₁-X₂-Z₁-Z₂-Z₃, Z₁-Z₂-Z₃-Y₁-Y₂-Y₃-Y₄-X₁-X₂-X₃-Z₁-Z₂-Z₃, Z₁-Z₂-Z₃-Y₁-Y₂-Y₃-Y₄-X₁-X₂-X₃-X₄-Z₁-Z₂-Z₃, Z₁-Z₂-Z₃-Z₄-Y₁-Y₂-X₁-X₂-Z₁-Z₂-Z₃, Z₁-Z₂-Z₃-Z₄-Y₁-Y₂-X₁-X₂-X₃-Z₁-Z₂-Z₃, Z₁-Z₂-Z₃-Z₄-Y₁-Y₂-X₁-X₂-X₃-X₄-Z₁-Z₂-Z₃, Z₁-Z₂-Z₃-Z₄-Y₁-Y₂-Y₃-X₁-X₂-Z₁-Z₂-Z₃, Z₁-Z₂-Z₃-Z₄-Y₁-Y₂-Y₃-X₁-X₂-X₃-Z₁-Z₂-Z₃, Z₁-Z₂-Z₃-Z₄-Y₁-Y₂-Y₃-X₁-X₂-X₃-X₃-X₄-Z₁-Z₂-Z₃, Z₁-Z₂-Z₃-Z₄-Y₃-Y₄-X₁-X₂-Z₁-Z₂-Z₃, Z₁-Z₂-Z₃-Z₄-Y₁-Y₂-Y₃-Y₄-X₁-X₂-X₃-Z₁-Z₂-Z₃, Z₁-Z₂-Z₃-Z₄-Y₁-Y₂-Y₃-Y₄-X₁-X₂-X₃-X₄-Z₁-Z₂-Z₃, Y₁-Y₂-X₁-X₂-Z₁-Z₂-Z₃-Z₄, Y₁-Y₂-X₁-X₂-X₃-Z₁-Z₂-Z₃-Z₄, Y₁-Y₂-X₁-X₂-X₃-X₄-Z₁-Z₂-Z₃-Z₄, Y₁-Y₂-Y₃-X₁-X₂-Z₁-Z₂-Z₃-Z₄, Y₁-Y₂-Y₃-X₁-X₂-X₃-Z₁-Z₂-Z₃-Z₄, Y₁-Y₂-Y₃-X₁-X₂-X₃-X₄-Z₁-Z₂-Z₃-Z₄, Y₁-Y₂-Y₃-Y₄-X₁-X₂-Z₁-Z₂-Z₃-Z₄, Y₁-Y₂-Y₃-Y₄-X₁-X₂-X₃-Z₁-Z₂-Z₃-Z₄, Y₁-Y₂-Y₃-Y₄-X₁-X₂-X₃-X₄-Z₁-Z₂-Z₃-Z₄, Z₁-Y₁-Y₂-X₁-X₂-Z₁-Z₂-Z₃-Z₄, Z₁-Y₁-Y₂-X₁-X₂-X₃-Z₁-Z₂-Z₃-Z₄, Z₁-Y₁-Y₂-X₁-X₂-X₃-X₄-Z₁-Z₂-Z₃-Z₄, Z₁-Y₁-Y₂-Y₃-X₁-X₂-Z₁-Z₂-Z₃-Z₄, Z₁-Y₁-Y₂-Y₃-X₁-X₂-X₃-Z₁-Z₂-Z₃-Z₄, Z₁-Y₁-Y₂-Y₃-X₁-X₂-X₃-X₄-Z₁-Z₂-Z₃-Z₄, Z₁-Y₁-Y₂-Y₃-Y₄-X₁-X₂-Z₁-Z₂-Z₃-Z₄, Z₁-Y₁-Y₂-Y₃-Y₄-X₁-X₂-X₃-Z₁-Z₂-Z₃-Z₄, Z₁-Y₁-Y₂-Y₃-Y₄-X₁-X₂-X₃-X₄-Z₁-Z₂-Z₃-Z₄, Z₁-Z₂-Y₁-Y₂-X₁-X₂-Z₁-Z₂-Z₃-Z₄, Z₁-Z₂-Y₁-Y₂-X₁-X₂-X₃-Z₁-Z₂-Z₃-Z₄, Z₁-Z₂-Y₁-Y₂-X₁-X₂-X₃-X₄-Z₁-Z₂-Z₃-Z₄, Z₁-Z₂-Y₁-Y₂-Y₃-X₁-X₂-Z₁-Z₂-Z₃-Z₄, Z₁-Z₂-Y₁-Y₂-Y₃-X₁-X₂-X₃-Z₁-Z₂-Z₃-Z₄, Z₁-Z₂-Y₁-Y₂-Y₃-X₁-X₂-X₃-X₄-Z₁-Z₂-Z₃-Z₄, Z₁-Z₂-Y₁-Y₂-Y₃-Y₄-X₁-X₂-Z₁-Z₂-Z₃-Z₄, Z₁-Z₂-Y₁-Y₂-Y₃-Y₄-X₁-X₂-X₃-Z₁-Z₂-Z₃-Z₄, Z₁-Z₂-Y₁-Y₂-Y₃-Y₄-X₁-X₂-X₃-X₄-Z₁-Z₂-Z₃-Z₄, Z₁-Z₂-Z₃-Y₁-Y₂-X₁-X₂-Z₁-Z₂-Z₃-Z₄, Z₁-Z₂-Z₃-Y₁-Y₂-X₁-X₂-X₃-Z₁-Z₂-Z₃-Z₄, Z₁-Z₂-Z₃-Y₁-Y₂-X₁-X₂-X₃-X₄-Z₁-Z₂-Z₃-Z₄, Z₁-Z₂-Z₃-Y₁-Y₂-Y₃-X₁-X₂-Z₁-X₂-Z₃-Z₄, Z₁-Z₂-Z₃-Y₁-Y₂-Y₃-X₁-X₂-X₃-Z₁-Z₂-Z₃-Z₄, Z₁-Z₂-Z₃-Y₁-Y₂-Y₃-X₁-X₂-X₃-X₄-Z₁-Z₂-Z₃-Z₄, Z₁-Z₂-Z₃-Y₁-Y₂-Y₃-Y₄-X₁-X₂-Z₁-Z₂-Z₃-Z₄, Z₁-Z₂-Z₃-Y₁-Y₂-Y₃-Y₄-X₁-X₂-X₃-Z₁-Z₂-Z₃-Z₄, Z₁-Z₂-Z₃-Y₁-Y₂-Y₃-Y₄-X₁-X₂-X₃-X₄-Z₁-Z₂-Z₃-Z₄, Z₁-Z₂-Z₃-Z₄-Y₁-Y₂-X₁-X₂-Z₁-Z₂-Z₃-Z₄, Z₁-Z₂-Z₃-Z₄-Y₁-Y₂-X₁-X₂-X₃-Z₁-Z₂-Z₃-Z₄, Z₁-Z₂-Z₃-Z₄-Y₁-Y₂-X₁-X₂-X₃-X₄-Z₁-Z₂-Z₃-Z₄, Z₁-Z₂-Z₃-Z₄-Y₁-Y₂-Y₃-X₁-X₂-Z₁-Z₂-Z₃-Z₄, Z₁-Z₂-Z₃-Z₄-Y₁-Y₂-Y₃-X₁-X₂-X₃-Z₁-Z₂-Z₃-Z₄, Z₁-Z₂-Z₃-Z₄-Y₁-Y₂-Y₃-X₁-X₂-X₃-X₄-Z₁-Z₂-Z₃-Z₄, Z₁-Z₂-Z₃-Z₄-Y₁-Y₂-Y₃-Y₄-X₁-X₂-Z₁-Z₂-Z₃-Z₄, Z₁-Z₂-Z₃-Z₄-Y₁-Y₂-Y₃-Y₄-X₁-X₂-X₃-Z₁-Z₂-Z₃-Z₄, Z₁-Z₂-Z₃-Z₄-Y₁-Y₂-Y₃-Y₄-X₁-X₂-X₃-X₄-Z₁-Z₂-Z₃-Z₄, wherein X₁ is selected from the group consisting of: (all single letter amino acid format) A, D, E, G, I, K, L, N, P, Q, R, and V; X₂ is selected from the group consisting of A, F, G, I, K, L, N, P, Q, R, S, T, V, and Y; X₃ is selected from the group consisting of A, D, E, F, G, I, K, L, N, Q, R, S, T, V, and Y; X₄ is selected from the group consisting of: R, H, K, D, E, S, T, N, Q, G, A, I, L, M, F, W, Y, and V. In some embodiments, Y₁ is selected from the group consisting of: (all single letter amino acid format) A, D, E, F, G, I, L, N, Q, S, T, V, and Y; Y₂ is selected from the group consisting of F, G, I, L, and Y; and Y₃ is selected from the group consisting of A, D, E, F, G, I, K, L, R, S, T, V, and Y; and Y₄ is selected from the group consisting of: R, H, K, D, E, S, T, N, Q, G, A, I, L, M, F, W, Y, and V. Specific exemplary tertiary peptides selected from the above groups of tertiary peptides are provided below.

[0154] In some illustrative embodiments, the binary peptide can contain at least 4 amino acids and up to a maximum of 8 amino acids, whereas the tertiary peptide can contain at least 5 amino acids up to a maximum of 16 amino acids.

[0155] In related embodiments, cleavable binary linker peptides (L) comprising an X region and a Y region are described above, and exemplary Z regions (1-4 amino acid sequences, for example, 2 amino acid sequences) that may be fused in frame to the X and/or Y regions (either to the N-terminal sequence of an X or Y region, or the C-terminal sequence of an X or Y region) described above form the tertiary cleavable linking peptides. Illustrative Z or spacer amino acid sequences may include: AA, AF, AM, AN, AQ, AV, AW, AY, DA, DD, DE, DF, DG, DI, DL, DP, DS, DT, DV, DW, DY, EA, ED, EE, EF, EG, EI, EL, EP, ES, ET, EV, EW, EY, FA, FD, FE, FF, FI, FK, FL, FM, FN, FQ, FR, FS, FT, FV, FW, FY, GA, GD, GE, GF, GI, GL, GM, GN, GQ, GS, GV, GW, GY, HA, HD, HE, HF, HH, HI, HK, HL, HN, HP, HQ, HR, HS, HT, HV, HY, IA, ID, IE, IG, IH, II, IK, IL, IM, IN, IP, IQ, IR, IS, IT, IV, IW, KA, KD, KE, KF, KI, KL, KN, KQ, KV, KY, LA, LD, LE, LG, LH, LI, LK, LL, LM, LN, LP, LQ, LR, LS, LT, LV, LW, MA, MF, MG, MI, MK, ML, MM, MN, MQ, MR, MS, MT, MV, MY, NA, ND, NE, NF, NI, NL, NM, NN, NQ, NS, NT, NV, NY, QA, QD, QE, QF, QI, QL, QM, QN, QQ, QS, QT, QV, QY, RA, RD, RE, RF, RI, RL, RN, RQ, RV, RY, SA, SF, SG, SK, SN, SP, SQ, SR, SS, ST, SV, SW, SY, TA, TF, TG, TK, TN, TP, TQ, TR, TS, TT, TV, TW, TY, VA, VF, VM, VN, VQ, VV, VW, VY, WA, WF, WI, WK, WL, WN, WP, WQ, WR, WS, WT, WV, WW, WY, YA, YD, YE, YF, YI, YK, YL, YM, YN, YQ, YR, YS, YT, YV, YW, or YY. In exemplary embodiments, individual tertiary peptides of the present invention can include a two amino acid sequence, fused in frame to the N-terminus and/or the C-terminus of an illustrative binary peptide disclosed above, wherein the two amino acid sequence is AM, LH, MN, ES, WQ, or DT.

[0156] In exemplary embodiments, individual tertiary peptides of the present invention can include a two amino acid sequence, fused in frame to the N-terminus and/or the C-terminus of an illustrative binary peptide disclosed above, wherein the two amino acid sequence is GS, WN, WQ, MA or MV.

[0157] In some embodiments, the spacer portion of the tertiary peptide (Z region) comprises the amino acid sequence GS, which may be fused in frame to the N-terminus or C-terminus of the binary peptide or both.

[0158] In various embodiments, exemplary binary peptides for use in the insecticidal and/or nematicidal polypeptides and proteins, DNA constructs and incorporated into transgenic plants or parts thereof, of the present invention may include one or more cleavable tertiary peptides comprising, or selected from the group of, or consisting of: a binary peptide selected from IFVRLR (SEQ ID NO: 1619), ALKLFV (SEQ ID NO: 1605), ALKFLV (SEQ ID NO: 1603), RRKAFV (SEQ ID NO: 1644), or LFAAPF (SEQ ID NO: 1621), fused in frame either on the N-terminus, C-terminus or both termini with a Z region or spacer sequence, comprising, or selected from the group of, or consisting of: GS, WN, WQ, MA, MV, AM, LH, MN, ES, WQ, or DT.

[0159] In some embodiments, exemplary tertiary linking peptides (L) for use in the insecticidal and/or nematicidal polypeptides and proteins, DNA constructs and incorporated into transgenic plants or parts thereof, of the present invention may include (ZXY or XYZ) comprising the following amino acid sequences: AFVRLFGS (SEQ ID NO: 1649), AKLFVGS (SEQ ID NO: 1650), ALFALKGS (SEQ ID NO: 1651), ALFLKGS (SEQ ID NO: 1652), ALFLRGS (SEQ ID NO: 1653), ALFRGS (SEQ ID NO: 1654), ALFRLRGS (SEQ ID NO: 1655), ALKALFGS (SEQ ID NO: 1656), ALKFFGS (SEQ ID NO: 1657), ALKFLVGS (SEQ ID NO: 1658), ALKIFVGS (SEQ ID NO: 1659), ALKLFVGS (SEQ ID NO: 1660), FFADIKGS (SEQ ID NO: 1661), FFALKGS (SEQ ID NO: 1662), FFLKGS (SEQ ID NO: 1663), FFLRGS (SEQ ID NO: 1664), FFRLRGS (SEQ ID NO: 1665), FGYRIKGS (SEQ ID NO: 1666), FLRLFGS (SEQ ID NO: 1667), FYARRGS (SEQ ID NO: 1668), GGLRKKGS (SEQ ID NO: 1669), IFVALKGS (SEQ ID NO: 1670), IFVLKGS (SEQ ID NO: 1671), IFVLRGS (SEQ ID NO: 1672), IFVRGS (SEQ ID NO: 1673), IFVRLRGS (SEQ ID NO: 1674), ILFNIKGS (SEQ ID NO: 1675), LFAAPFGS (SEQ ID NO: 1676), LFVALKGS (SEQ ID NO: 1677), LFVLKGS (SEQ ID NO: 1678), LFVLRGS (SEQ ID NO: 1679), LFVRGS (SEQ ID NO: 1680), LFVRLRGS (SEQ ID NO: 1681), LFVRVFLGS (SEQ ID NO: 1682), LGERGS (SEQ ID NO: 1683), LKALFGS (SEQ ID NO: 1684), LKFFGS (SEQ ID NO: 1685), LKIFVGS (SEQ ID NO: 1686), LKLFVGS (SEQ ID NO: 1687), LRALFGS (SEQ ID NO: 1688), LRFFGS (SEQ ID NO: 1689), LRIFVGS (SEQ ID NO: 1690), LRLFVGS (SEQ ID NO: 1691), RALFGS (SEQ ID NO: 1692), RIFVGS (SEQ ID NO: 1693), RLFVGS (SEQ ID NO: 1694), RLRALFGS (SEQ ID NO: 1695), RLRFFGS (SEQ ID NO: 1696), RLRIFVGS (SEQ ID NO: 1697), RLRLFVGS (SEQ ID NO: 1698), RRKAFVGS (SEQ ID NO: 1699), RRKLIFGS (SEQ ID NO: 1700), RRRFFAGS (SEQ ID NO: 1701), VFGRKGGS (SEQ ID NO: 1702), YFVRKGS (SEQ ID NO: 1703), GSAFVRLF (SEQ ID NO: 1704), GSAKLFV (SEQ ID NO: 1705), GSALFALK (SEQ ID NO: 1706), GSALFLK (SEQ ID NO: 1707), GSALFLR (SEQ ID NO: 1708), GSALFR (SEQ ID NO: 1709), GSALFRLR (SEQ ID NO: 1710), GSALKALF (SEQ ID NO: 1711), GSALKFF (SEQ ID NO: 1712), GSALKFLV (SEQ ID NO: 1713), GSALKIFV (SEQ ID NO: 1714), GSALKLFV (SEQ ID NO: 1715), GSFFADIK (SEQ ID NO: 1716), GSFFALK (SEQ ID NO: 1717), GSFFLK (SEQ ID NO: 1718), GSFFLR (SEQ ID NO: 1719), GSFFRLR (SEQ ID NO: 1720), GSFGYRIK (SEQ ID NO: 1721), GSFLRLF (SEQ ID NO: 1722), GSFYARR (SEQ ID NO: 1723), GSGGLRKK (SEQ ID NO: 1724), GSIFVALK (SEQ ID NO: 1725), GSIFVLK (SEQ ID NO: 1726), GSIFVLR (SEQ ID NO: 1727), GSIFVR (SEQ ID NO: 1728), GSIFVRLR (SEQ ID NO: 1729), GSILFNIK (SEQ ID NO: 1730), GSLFAAPF (SEQ ID NO: 1731), GSLFVALK (SEQ ID NO: 1732), GSLFVLK (SEQ ID NO: 1733), GSLFVLR (SEQ ID NO: 1734), GSLFVR (SEQ ID NO: 1735), GSLFVRLR (SEQ ID NO: 1736), GSLFVRVFL (SEQ ID NO: 1737), GSLGER (SEQ ID NO: 1738), GSLKALF (SEQ ID NO: 1739), GSLKFF (SEQ ID NO: 1740), GSLKIFV (SEQ ID NO: 1741), GSLKLFV (SEQ ID NO: 1742), GSLRALF (SEQ ID NO: 1743), GSLRFF (SEQ ID NO: 1744), GSLRIFV (SEQ ID NO: 1745), GSLRLFV (SEQ ID NO: 1746), GSRALF (SEQ ID NO: 1747), GSRIFV (SEQ ID NO: 1748), GSRLFV (SEQ ID NO: 1749), GSRLRALF (SEQ ID NO: 1750), GSRLRFF (SEQ ID NO: 1751), GSRLRIFV (SEQ ID NO: 1752), GSRLRLFV (SEQ ID NO: 1753), GSRRKAFV (SEQ ID NO: 1754), GSRRKLIF (SEQ ID NO: 1755), GSRRRFFA (SEQ ID NO: 1756), GSVFGRKG (SEQ ID NO: 1757), and GSYFVRK (SEQ ID NO: 1758).

[0160] In various embodiments, a representative binary peptide of the present invention can include: IFVRLR (SEQ ID NO: 1619), ALKLFV (SEQ ID NO: 1605), ALKFLV (SEQ ID NO: 1603), RRKAFV (SEQ ID NO: 1644), or LFAAPF (SEQ ID NO: 1621).

[0161] (1D). INSECTICIDAL AND/OR NEMATICIDAL PROTEINS

[0162] In various embodiments of the present invention, the present disclosure provides an insecticidal and/or nematicidal protein having a cleavable peptide (L) (a binary or a tertiary peptide) as described above fused in frame with an insecticidal or nematicidal toxic protein (TP).

[0163] In another embodiment, the present invention provides an insecticidal and/or nematicidal protein having two or more cleavable peptides, wherein the insecticidal and/or nematicidal protein comprises a binary or tertiary peptide, the binary or tertiary peptide is fused in frame with a construct comprising, consisting essentially of, or consisting of: (L-TP)ₙ, or (L-TP)ₙ-L, or (TP-L)ₙ, or L-(TP-L)ₙ, wherein TP is a toxic peptide or protein, L is a binary or tertiary cleavable peptide, and n is an integer ranging from 1 to 200, or from 1 to 100, or from 1 to 10. In another embodiment, the insecticidal and/or nematicidal protein described herein comprises an endoplasmic reticulum signal peptide (ERSP) fused in frame with: a binary peptide or tertiary peptide, which is fused in frame with an insecticidal and/or nematicidal toxic protein and/or a repeat construct (L-TP)ₙ or (TP-L)ₙ, wherein n is an integer ranging from 1 to 200, or from 1 to 100, or from 1 to 10. In various embodiments, an exemplary insecticidal and/or nematicidal protein can include a protein construct comprising: (ERSP)-(TP-L)ₙ, or (ERSP)-(L)-(TP-L)ₙ, or (ERSP)-(L-TP)ₙ, or (ERSP)-(L-TP)ₙ-(L), wherein n is an integer ranging from 1 to 200. In various related embodiments described above, TP is a toxic protein, L is a binary or tertiary peptide and n is an integer ranging from 1 to 200, preferably an integer ranging from 1 to 100, and more preferably an integer ranging from 1 to 10. In some embodiments, the insecticidal and/or nematicidal protein may contain TPs that are the same or different, and binary and/or tertiary peptides that are the same or different. In some embodiments, the C-terminal TP is fused or unfused at its C-terminus with a binary or tertiary peptide. In some embodiments, the N-terminal TP is fused or unfused at its N-terminus with a binary or tertiary peptide.

[0164] In another embodiment, the present invention provides an insecticidal and/or nematicidal protein having two or more cleavable peptides, wherein the insecticidal and/or nematicidal protein comprises a stabilizing domain (STA) fused in frame with either the N-terminus of a binary or tertiary peptide, or the N-terminus of a construct comprising: (L-TP)ₙ, (L-TP)ₙ-L, (TP-L)ₙ, or L-(TP-L)ₙ. In some related embodiments, an insecticidal and/or nematicidal protein comprises an ERSP fused in frame with the N-terminus of a stabilizing domain (STA), which is fused in frame with either the N-terminus of a binary or tertiary peptide, being fused to the N-terminus of a toxic protein, or the N-terminus of a construct comprising: (L-TP)ₙ, (L-TP)ₙ-L, (TP-L)ₙ, or L-(TP-L)ₙ.

[0165] In various embodiments, an exemplary insecticidal and/or nematicidal protein can include a construct comprising: (ERSP)-(STA)-(L-TP)ₙ, or (ERSP)-(STA)-(L-TP)ₙ-(L), or (ERSP)-(STA)-(TP-L)ₙ, or (ERSP)-(STA)-(L)-(TP-L)ₙ, or (STA)-(L-TP)ₙ, or (STA)-(L-TP)ₙ-(L), or (STA)-(TP-L)ₙ, or (STA)-(L)-(TP-L)ₙ. In some related embodiments, an insecticidal and/or nematicidal protein comprises an ERSP fused in frame with either the N-terminus of a binary or tertiary peptide, being fused to the N-terminus of a toxic protein, or the N-terminus of a construct comprising: (L-TP)ₙ, (L-TP)ₙ-L, (TP-L)ₙ, or L-(TP-L)ₙ. In various embodiments, an exemplary insecticidal and/or nematicidal protein can include a construct comprising: (ERSP)-(L-TP)ₙ, or (ERSP)-(L-TP)ₙ-(L), or (ERSP)-(TP-L)ₙ, or (ERSP)-(L)-(TP-L)ₙ. In various embodiments as described herein and above, TP is defined as a toxic protein, that is toxic to an insect and/or a nematode, L is a binary or tertiary peptide and n is an integer ranging from 1 to 200, preferably an integer ranging from 1 to 100, and more preferably an integer ranging from 1 to 10. In some embodiments, the C-terminal TP of a construct described herein and above is fused or unfused at its C-terminus with a binary or tertiary peptide. In some embodiments, the N-terminal TP is fused or unfused at its N-terminus with a binary or tertiary peptide. In some of the above embodiments, the TP used in the insecticidal and/or nematicidal protein can be a peptide or protein having an amino acid sequence as set forth in SEQ ID NOs 5-1593 and 1761-1775, or a variant thereof. In various embodiments, the TP may be the same or different, and the linker (L) may be the same or different. In some related embodiments, TPs useful in the various insecticidal and/or nematicidal proteins, polynucleotides and DNA constructs encoding these insecticidal and/or nematicidal proteins, and transgenic plants or plant cells containing these insecticidal and/or nematicidal proteins, include peptides having at least 80%, at least 85%, at least 90%, at least 95%, at least 96%, at least 97%, at least 98%, at least 99%, or at least 100% sequence identity or sequence homology to a peptide having an amino acid sequence as set forth in SEQ ID NOs: 5, 6 and 1761, 1762, 1767, 1771-1773, and variants thereof.

[0166] (2). Endoplasmic Reticulum Signal Peptide (ERSP)

[0167] In various embodiments, the binary and/or tertiary cleavable linking peptides may be linked, or fused, or coupled (i.e., connected in frame, and used interchangeably herein) with one or more additional components. In some embodiments, the binary and/or tertiary cleavable linking peptides are linked to an endoplasmic reticulum signal peptide (ERSP) as further described herein.

[0168] In various embodiments, the N-terminus of an illustrative binary and/or tertiary cleavable linking peptide is linked to the C-terminus of the ERSP.

[0169] As used herein, an ERSP refers to a short continuous stretch of amino acids residues at the amino-terminus of secreted and membrane-bound proteins. The signal peptide targets the protein to the secretory pathway and is cleaved from the nascent chain once translocated in the endoplasmatic reticulum membrane. The signal peptide consists of three regions: an amino-terminal polar region (N region), where frequently positive charged amino acid residues are observed, a central hydrophobic region (H region) of 7-8 amino acid residues and a carboxy-terminal region (C region) that includes the cleavage site. The cleavage of the signal peptide from the mature protein or polypeptide occurs at this cleavage site. An exemplary ERSP is between 3 to 100 amino acids in length, or between 5 to 50 amino acids in length, or between 20 to 30 amino acids in length. The ERSP is a signal peptide so called because it directs the transportation of a protein. Signal peptides may also be called targeting signals, signal sequences, transit peptides, or localization signals. The signal peptides for ER trafficking are often 15 to 30 amino acid residues in length and have a tripartite organization, comprised of a core of hydrophobic residues flanked by a positively charged amino terminal and a polar, but uncharged carboxy terminal region. (Zimmermann, et al., “Protein translocation across the ER membrane”, Biochimica et Biohysica Acta, 2011, 1808: 912-924).

[0170] Many ERSPs are known. Many plant ERSPs are known. In various embodiments, illustrative ERSPs include the ERSP be derived from a plant ERSP. In some embodiments, illustrative ERSPs also include non-plant ERSPs, which are operable with the procedures described herein. Many plant ERSPs are however well known and certain exemplified plant derived ERSPs are useful in the present invention. As used herein, “plant ERSPs” include naturally occurring ERSPs from plant origin. They do not include non-plant originated ERSPs that have been transfected into plants or plant cells and expressed in plants. In one illustrative embodiment, a plant ERSP includes the barley alpha-amylase signal peptide (BAAS), for example, is derived from the plant, Hordeum vulgare, and has the amino acid sequence as follows: MANKHLSLSLFLVLLGLSASLASG (SEQ ID NO: 4).

[0171] In other embodiments, an exemplary ERSP can include a yeast α-mating factor prepro peptide signal leader consisting of a 19-amino acid signal (pre) sequence followed by a 67-residue (pro) sequence containing three consensus N-linked glycosylation sites and a dibasic Kex2 endopeptidase processing site. In some embodiments, an illustrative ERSP can include a mature yeast α-mating factor. In these embodiments, an exemplary yeast α-mating factor prepro peptide signal leader and mature yeast α-mating factor can be found in Pichia pastoris and Saccharomyces cerevisiae yeast strains.

[0172] Plant ERSPs, which are selected from the genomic sequence for proteins that are known to be expressed and released into the apoplastic space of plants, and a few examples include: barley alpha-amylase signal peptide, carrot extensin, tobacco PR1. The following references provide further descriptions, and are incorporated by reference herein in their entirety. De Loose, M. et al. “The extensin signal peptide allows secretion of a heterologous protein from protoplasts” Gene, 99 (1991) 95-100. De Loose, M. et al. described the structural analysis of an extensin-encoding gene from Nicotiana plumbaginifolia, the sequence of which contains a typical signal peptide for translocation of the protein to the endoplasmic reticulum. Chen, M. H. et al. “Signal peptide-dependent targeting of a rice alpha-amylase and cargo proteins to plastids and extracellular compartments of plant cells” Plant Physiology, 2004 July; 135(3): 1367-77. Epub 2004 Jul. 2. Chen, M. H. et al. studied the subcellular localization of α-amylases in plant cells by analyzing the expression of α-amylase, with and without its signal peptide, in transgenic tobacco. These references and others teach and disclose the signal peptide that can be used in the methods, procedures and peptide, protein and nucleotide complexes and constructs described herein.

[0173] In some embodiments, the ERSP can be a barley alpha-amylase signal peptide, or a tobacco extensin signal peptide, or a modified tobacco extensin signal peptide, or a Jun a 3 signal peptide of Juniperus ashei or J. ashei or a signal peptide of potato proteinase inhibitor (II) (pinII).

[0174] PCR primers operable to isolate the ERSP sequences from plants and other eukaryotic cells are known in the art and are commercially available.

[0175] In related embodiments, the binary and/or tertiary cleavable linking peptides coupled to an ERSP is linked to the N-terminus of a toxic peptide (TP) (ERSP-TP).

[0176] (3). Toxic Peptides (TP)

[0177] A TP of the present invention includes any polypeptide or protein having insecticidal and/or nematicidal activity when ingested by, in contact with, or injected into an insect or nematode respectively. In various embodiments, several classes of TPs that are polymers of amino acids, i.e., proteinaceous materials can be employed and synthesized as single units or multimers of the same TP species or a mixture of TP species contained within one transgenically expressed protein, wherein each of the plurality of TPs are flanked by one or two cleavable binary or tertiary peptides as described above. In various embodiments, exemplary classes of TPs useful in the insecticidal and/or nematicidal proteins described herein can include: CRIP TPs, ICK TPs, non-ICK TPs, sea anemone peptides, TMOF peptides and Bt proteins. In various embodiments, the insecticidal and/or nematicidal proteins of the present disclosure, are non-natural, man-made constructs comprising at least one binary or tertiary cleavable linker peptide and at least one TP.

[0178] The insecticidal and/or nematicidal proteins of the present disclosure may be synthesized chemically, made recombinantly, and in some embodiments, are synthesized as an insecticidal and/or nematicidal protein from a polynucleotide that is inserted into a yeast cell, a plant, plant tissue or is expressed under appropriate conditions in a plant, plant tissue or a plant seed. In some embodiments, insecticidal and/or nematicidal proteins of the present disclosure include an ERSP.

[0179] In related embodiments, the insecticidal and/or nematicidal proteins include an ERSP, two or more binary or tertiary cleavable linker peptides and one or more TPs positioned adjacent to a binary or tertiary cleavable linker peptides. Other multimers and polymers comprising binary and/or tertiary cleavable linker peptides and TP subunits may be synthesized and are described further herein. In related embodiments, the multimers and polymers comprising binary or tertiary cleavable linker peptides and TP subunits may also comprise an ERSP at the N-terminus of the insecticidal and/or nematicidal protein, and may also comprise a stabilizing domain (STA). In some embodiments, a STA may also include a TP, for example, an ICK TP. (See for example, FIGS. 3A and 5, 6A and 6C).

[0180] As used herein a “construct” includes a polypeptide or protein that is made up of various polypeptide units, for example, ERSP, binary or tertiary cleavable linker peptides, TPs and STA, each of these subunits are fused in frame and operable to be synthesized as a single protein. These constructs which may be written in short form designated as L for binary or tertiary cleavable linker peptides or “linker”, TP for toxic proteins, ERSP for endoplasmic reticulum signal peptide, and STA for stabilization domain. In various embodiments, the insecticidal and/or nematicidal proteins of the present invention may comprise TPs that may be the same or they may be different.

[0181] In addition, in some embodiments, the insecticidal and/or nematicidal proteins of the present invention may comprise binary or tertiary cleavable linker peptides that may be the same or different. In various embodiments, the insecticidal and/or nematicidal proteins of the present invention may have the same types of TPs fused with the same type of linkers, as described in the various examples of insecticidal and/or nematicidal proteins disclosed and illustrated herein, and as represented by the various constructs, insecticidal and/or nematicidal proteins and polynucleotides encoding all of the aforementioned insecticidal and/or nematicidal proteins of the present invention. In some embodiments, in the case where a DNA construct or a polynucleotide contains an open reading frame with a single TP, the TP can include Bt TPs, in addition to all of the other described TPs, with the proviso that if the DNA construct or polynucleotide contains an open reading frame containing two or more TPs, the two or more TPs cannot be Bt TPs.

[0182] An exemplary class of TPs include the Cysteine Rich Insecticidal Proteins (CRIPS). The CRIPS have 4, 6 or 8 cysteines and 2, 3 or 4 disulfide bonds. One example of this class of TPs are called inhibitor cysteine knot (ICK) motif protein. ICK motif TPs are a class of proteins with at least six cysteine residues that form a specific ICK tertiary structure. Covalent cross-linking of the cysteine residues in the ICK motif TPs form disulfide bridges that result in a tertiary structures that makes the protein relatively resistant to proteases and sometimes to extreme physical conditions (pH, temperature, UV light, etc.), and confers activity against ion channels, which may be specific to insects. Many ICK motif TPs have evolved in the venom of invertebrates and vertebrates that use the ICK motif TPs as a toxin to immobilize or kill their predators or prey. Such insecticidal peptides often have scorpion, spider and sometimes snake origins. In nature, toxic peptides can be directed to the insect's gut or to internal organs by injection. In the case of a TP of the present invention, the delivery of TPs is usually via the insect's consumption of insecticidal and/or nematicidal protein expressed in plant tissue. Upon this consumption of the toxin from its food, for example an insect feeding upon a transgenic plant, the ICK motif TP may have the ability to inhibit the growth, impair the movement, or even kill an insect.

[0183] ICK motif TPs have been shown by others to lose their toxicity when they are expressed in plants. Unless the ICK motif TP is expressed as a properly folded protein it cannot successfully protect a plant or crop from insect damage. In some cases a plant expressed peptide will need to be activated by cleavage within the insect or during expression process in a plant in order to be active. Plant expressed inhibitory cysteine knot (ICK) motif proteins from spiders and scorpions have been described (Khan et al., Transgenic Res., 2006, 15: 349-357; Hernandez-Campuzano et al., Toxicon. 2009 January; 53(1):122-8.) ICK motif TP,” or “inhibitor cystine knot motif protein”, which is a 16 to 60 amino acid peptide with at least 6 half-cysteine core amino acids having three disulfide bridges, wherein the 3 disulfide bridges are covalent bonds and of the six half-cystine residues the covalent disulfide bonds are between the first and fourth, the second and fifth, and the third and sixth half-cystines, of the six core half-cystine amino acids starting from the N-terminal amino acid. The ICK motif TP also comprises a beta-hairpin secondary structure, normally composed of residues situated between the fourth and sixth core half-cysteines of the motif, the hairpin being stabilized by the structural crosslinking provided by the motifs three disulfide bonds. Note that additional cysteine/cysteine or half-cystine amino acids may be present within the inhibitor cysteine knot motif.

[0184] The ICK motif is common in peptides isolated from the venom of numerous species. Invertebrate species include spiders, scorpions, cone snail, sea anemone etc., other examples are numerous, even snake venom has been known to have peptides having the ICK motif.

[0185] An example of ICK TPs include ACTX peptides (for example, a U-ACTX peptide, an Omega-ACTX peptide or a Kappa-ACTX peptide) from the Australian Blue Mountains Funnel-web Spider. Other ICK proteins described herein may be used to synthesize insecticidal and/or nematicidal proteins described herein.

[0186] Examples of TPs with the ICK motif can be found in the following references. The N-type calcium channel blocker w-Conotoxin was reviewed by Lew, M. J. et al. “Structure-Function Relationships of w-Conotoxin GVIA” Journal of Biological Chemistry, Vol. 272, No. 18, Issue of May 2, pp. 12014-12023, 1997. A summary of numerous arthropod toxic peptides from different spider and scorpion species was reviewed in, Quintero-Hernandez, V. et al. “Scorpion and Spider Venom Peptides: Gene Cloning and Peptide Expression” Toxicon, 58, pp. 644-663, 2011. The three-dimensional structure of Hanatoxinl using NMR spectroscopy was identified as an inhibitor cysteine knot motif in Takahashi, H. et al. “Solution structure of hanatoxinl, a gating modifier of voltage-dependent K+ channels: common surface features of gating modifier toxins” Journal of Molecular Biology, Volume 297, Issue 3, 31 Mar. 2000, pp. 771-780. The isolation and identification of cDNA encoding a scorpion venom ICK toxin peptide, Opicalcinel, was published by Zhu, S. et al. “Evolutionary origin of inhibitor cystine knot peptides” FASEB J., 2003 Sep. 17, (12):1765-7, Epub 2003 Jul. 3. The sequence-specific assignment and the secondary structure identification of BgK, a K+ channel-blocking toxin from the sea anemone Bunodosoma granulifera, was disclosed by Dauplais, M. et. al. “On the convergent evolution of animal toxins” Journal of Biological Chemistry. 1997 Feb. 14; 272(7): 4302-9. A review of the composition and pharmacology of spider venoms with emphasis on polypeptide toxin structure, mode of action, and molecular evolution showing cysteine bridges, cysteine knot formations and the “knotting-type” fold was published by Escoubas, P. et al. “Structure and pharmacology of spider venom neurotoxins” Biochimie, Vol. 82, Issues 9-10, 10 Sep. 2000, pp. 893-907. The purified peptide, iberiotoxin, an inhibitor of the Ca2+-activated K+ channel, from scorpion (Buthus tamulus) venom was disclosed in Galvez, A. et al. “Purification and characterization of a unique, potent, peptidyl probe for the high conductance calcium-activated potassium channel from venom of the scorpion Buthus tamulus” Journal of Biological Chemistry, 1990 Jul. 5; 265(19): 11083-90.

[0187] The purified peptide, charybdotoxin, an inhibitor of the Ca2+-activated K+ channel, from the venom of the scorpion Leiurus quinquestriatus was disclosed in Gimenez-Gallego, G. et al. “Purification, sequence, and model structure of charybdotoxin, a potent selective inhibitor of calcium-activated potassium channels” Proc. Natl. Acad. Sci., 1988 May; 85(10): 3329-3333.

[0188] From these and other publications, one skilled in the art should be able to readily identify proteins and peptides having what we describe as the ICK motif TP (which is used interchangeably with “ICK motif”, “ICK motif protein” and the “inhibitor cystine knot motif”).

[0189] In some examples, ICK motif TPs have between 26-60 amino acids in length. Some ICK motif TPs are between 16-48 amino acids in length. Some ICK motif TPs are between 26-48 amino acids in length. Some ICK motif TPs are between 30-44 amino acids in length. ICK motif TPs with natural insecticidal activity are preferred but ICK motif TPs with other types of activity such as salt and frost resistance are known to those skilled in the art and are claimed herein. Examples of ICK motif TPs include the ACTX peptides and genes, and including all of the peptides and their coding genes known as Magi6.

[0190] Specific examples of ICK motif TPs and peptides disclosed for purposes of providing examples and not intended to be limiting in any way, are the TPs and their homologs and peptide variants thereof as described above. In some embodiments, some preferred TPs are those particular peptides and nucleotides which originate from the venoms of Australian Funnel-web spiders. In various embodiments, illustrative TPs for use in the preparation of an insecticidal and/or nematicidal protein, composition, insecticidal and/or nematicidal protein, or polynucleotide encoding the same, can include one or more TPs selected from the group: U-ACTX TPs, Kappa-ACTX TPs and Omega-ACTX TPs and polynucleotides encoding the same. The following documents are incorporated by reference in the United States in their entirety, are known to one skilled in the art, and have all been published. They disclose numerous ICK motif TPs which, their full peptide sequence, their full nucleotide sequence, are specifically disclosed and are incorporated by reference, and in addition the full disclosures are incorporated by reference including all of their sequence listings. See the following references: (all incorporated herein by reference in their entireties): U.S. Pat. No. 7,354,993 B2, issued Apr. 8, 2008, specifically the peptide and nucleotide sequences listed there as SEQ ID NOs: 1-39, from U.S. Pat. No. 7,354,993 B2, and those named U-ACTX polypeptides, and these and other toxins that can form 2 to 4 intra-chain disulfide bridges, and variants thereof, and the peptides appearing on columns 4 to 9 and in FIG. 2 of U.S. Pat. No. 7,354,993 B2.

[0191] Other specific sequences can be found in EP patent 1 812 464 B1, published and granted Aug. 10, 2008, see Bulletin 2008/41, specifically the peptide and nucleotide sequences listed in the sequence listing, and those the other toxins that can form 2 to 4 intra-chain disulfide bridges, and those sequences listed there as 1-39, and sequences named U-ACTX polypeptides, and variants thereof, and the peptides appearing in paragraphs 0023 to 0055, and appearing in FIG. 1 of EP patent 1 812 464 B1, the disclosures of all of the specifically enumerated patent references are incorporated by reference herein in their entireties.

[0192] Described and incorporated by reference herein as examples of insecticidal and/or nematicidal proteins and peptides are TPs including the following: peptides and variants thereof found in, isolated from, or derived from spiders of the genus Atrax or Hadronyche, including the genus species, Hadronyche versuta, or the Blue Mountain funnel web spider, Atrax robustus, Atrax formidabilis, Atrax infensus, including TPs known as U-ACTX polypeptides, which include: U-ACTX-Hv1a, U+2-ACTX-Hv1a, rU-ACTX-Hv1a, rU-ACTX-Hv1b, or mutants or variants, especially peptides of any of these types and especially those less than about 200 amino acids but greater than about 10 amino acids, and especially peptides less than about 150 amino acids but greater than about 20 amino acids, especially peptides less than about 100 amino acids but greater than about 25 amino acids, especially peptides less than about 65 amino acids but greater than about 25 amino acids, especially peptides less than about 55 amino acids but greater than about 25 amino acids, especially peptides of about 37 or 39 or about 36 to 42 amino acids, especially peptides with less than about 55 amino acids but greater than about 25 amino acids, especially peptides with less than about 45 amino acids but greater than about 35 amino acids, especially peptides with less than about 115 amino acids but greater than about 75 amino acids, especially peptides with less than about 105 amino acids but greater than about 85 amino acids, especially peptides with less than about 100 amino acids but greater than about 90 amino acids, including peptide toxins of any of the lengths mentioned here that can form 2, 3 and or 4 or more intrachain disulfide bridges, including toxins that disrupt calcium channel currents, including toxins that disrupt potassium channel currents, especially toxins that disrupt insect calcium channels or Us thereof, especially toxins or variants thereof of any of these types, and any combination of any of the types of toxins described herein that have oral or topical insecticidal and/or nematicidal activity, can be made special by the processes described herein.

[0193] The U peptides from the Australian Funnel Web Spider, genus Atrax and Hadronyche are particularly suitable and work well when treated by the methods, procedures or processes described by this invention. Examples of such suitable peptides tested and with data are provided herein. The following species are also specifically known to carry toxic peptides suitable for plant expression as insecticidal and/or nematicidal proteins by the methods disclosed in this invention.

[0194] The following species are specifically named: Atrax formidabillis, Atrax infensus, Atrax robustus, Hadronyche infensa, Hadronyche versuta. Any TPs derived from any of the genus and species listed above and/or genus species and may be homologous to the U peptide are suitable for plant expression as insecticidal and nematicidal proteins according to the present invention. Other TPs suitable for use in the various insecticidal and/or nematicidal polypeptides and proteins described herein, include: Kappa ACTX TPs, Omega-ACTX TPs and U-ACTX TPs.

[0195] In some embodiments, specific TPs can be cloned into proper expression vectors and along with the ERSP and cleavable linking groups disclosed herein can be made into an insecticidal and/or nematicidal protein suitable for transforming a plant, or a part thereof, or the insecticidal and/or nematicidal protein may be formulated with appropriate excipients to be applied to the surface of a plant, or plant part. In some embodiments, a suitable TP can include an ICK motif TP: QYCVP VDQPC SLNTQ PCCDD ATCTQ ERNEN GHTVYYCRA (SEQ ID NO: 6), named “U-ACTX-Hv1a,” it has disulfide bridges at positions: 3-18, 10-23, 17-37. The molecular weight is 4426.84 Daltons. In another embodiment, specific TPs can be cloned into proper expression vectors and along with the ERSP and cleavable linking groups disclosed herein can be made into an insecticidal and/or nematicidal protein suitable for transforming a plant, or a part thereof, or the insecticidal and/or nematicidal protein may be formulated with appropriate excipients to be applied to the surface of a plant, or plant part. In some embodiments, a suitable TP can include an ICK motif TP: GSQYC VPVDQ PCSLN TQPCC DDATC TQERN ENGHT VYYCR A (SEQ ID NO: 5), named “U+2-ACTX-Hv1a,” it has disulfide bridges at positions: 5-20, 12-25, 19-39. The molecular weight is 4564.85 Daltons. Other ICK TPs useful in the various insecticidal and/or nematicidal proteins, polynucleotides and DNA constructs encoding these insecticidal and/or nematicidal proteins, and transgenic plants or plant cells containing these insecticidal and/or nematicidal proteins, include peptides or proteins having at least 80%, at least 85%, at least 90%, at least 95%, at least 96%, at least 97%, at least 98%, at least 99%, or at least 100% sequence identity or sequence homology to a peptide or protein having an amino acid sequence as set forth in SEQ ID NOs: 5-1593 and 1761-1775. In related embodiments, ICK TPs useful in the various insecticidal and/or nematicidal proteins, polynucleotides and DNA constructs encoding these insecticidal and/or nematicidal proteins, and transgenic plants or plant cells containing these insecticidal and/or nematicidal proteins, include peptides or proteins having at least 80%, at least 85%, at least 90%, at least 95%, at least 96%, at least 97%, at least 98%, at least 99%, or at least 100% sequence identity or sequence homology to a peptide or protein having an amino acid sequence as set forth in SEQ ID NOs: 5, 6 and 1761, 1762, 1767, 1771-1773, and variants thereof.

[0196] (3A). Bt TPs

[0197] In some embodiments, illustrative TPs can also include those TPs expressed, or isolated from Bacillus thuringiensis, (Bt). This ubiquitous Gram-positive spore-forming bacterium provides a valuable resource due to its ability to synthesize crystal parasporal inclusions during sporulation. These crystals, which include insecticidal proteins called 6-endotoxins have been extensively used as biological insecticides against insect pests of commercial interest. Bt crystal toxins include the Cry proteins (crystal toxins) and Cyt proteins (cytolytic toxins). The Cry toxins are important virulence factors allowing for the development of the bacterium in dead or weakened insect larvae. The largest group of Cry toxins has three distinct structural domains; the so-called three-domain (3D) Cry toxins provide the primary focus for this review. The Cyt toxins have in vitro cytolytic activity, in addition to in vivo activity against various insects including mosquitos [5]. Cyt toxins which are active against certain Diptera, synergize the toxicity of Cry proteins against mosquitoes and delay the expression of resistance to the latter Bt proteins, or Bt peptides (collectively referred to herein as Bt TPs), are effective insecticides used for crop protection in the form of both plant incorporated protectants and foliar sprays. Commercial formulations of Bt proteins are widely used to control insects at the larval stage. The Bt Cry and Cyt proteins require solubilization in the insect midgut to produce protoxins that are typically about 130 kDa, 70 kDa or 27 kDa for Cyt. These in turn are proteolytically cleaved at the C-terminus and/or at the N-terminus by midgut proteases, generating the activated core toxin. Cry protoxins are proteolytically activated to produce the mature active toxin. Processing of the Cry protoxin into its active form is essential for toxin activity. Processing is mediated by insect proteases that cleave the protoxin polypeptide at specific sequences. The toxin then crosses the peritrophic matrix and binds to receptors in the apical membrane of the midgut cells, with receptor binding being an important determinant of toxin specificity. Toxin insertion into the epithelial membrane forms ion channels or pores, leading to lysis of the cells, damage to the midgut epithelial tissue, and death of the larva.

[0198] Among susceptible species in the orders Lepidoptera and Diptera, the maj or gut proteases are of the serine type, while in Coleoptera the major proteases are cysteine and aspartic proteases, although some use cathepsin G serine proteases. Since activation is a crucial step to achieve toxicity, it has been suggested that the type and/or abundance of insect proteases is important in contributing to toxin specificity. In some cases, certain insects lack the ability to cleave the inactive portion from the activated or “active” portion of the Bt TP. The present invention provides for certain insecticidal and/or nematicidal proteins that have a binary or teriary cleavable linker positioned between the inactive portion and the activated or “active” portion of the Bt TP (See FIG. 3B) and insecticidal and/or nematicidal proteins that include multiple copies (for example, 2-10 copies of the Bt TP having an intervening cleavable linker positioned between the inactive and active portions of the Bt TP) in the form of insecticidal and/or nematicidal proteins and polynucleotides that encode the Bt TPs and insecticidal and/or nematicidal proteins referenced above. In some embodiments, in the case where a DNA construct or a polynucleotide contains an open reading frame with a single TP, the TP can include Bt TPs, in addition to all of the other described TPs, with the proviso that if the DNA construct or polynucleotide contains an open reading frame containing two or more TPs, the two or more TPs cannot be two or more Bt TPs.

[0199] Specific examples of Bt TPs can include peptides where the Bt Protein is a Cry or Cyt protein, and/or the Bt Protein is selected from the group consisting of a Cry1, Cry3, TIC851, CryET70, Cry22, TIC901, TIC201, TIC407, TIC417, a binary insecticidal protein CryET80, and CryET76, a binary insecticidal protein TIC100 and TIC101, a combination of an insecticidal protein ET29 or ET37 with an insecticidal protein TIC810 or TIC812 and a binary insecticidal protein PS149B1. The Bt TP can be selected from a Cry protein, a Cry1A protein or a Cry1F protein, or a combination Cry1F-Cry1A protein, or it comprises an amino acid sequence at least 90% identical to SEQ ID NOs: 10, 12, 14, 26, 28, or 34 of U.S. Pat. No. 7,304,206. We describe a transgenic plant wherein the Bt TP is Dipel and we describe a transgenic plant wherein the Bt TP is Thuricide. In another example of an insecticidal and/or nematicidal polypeptide and protein described herein, is a Cry Bt TP called Cry51. This Bt TP is disclosed in U.S. Pat. No. 8,609,936 B2 (issued on 12/17, 2013, the disclosure of which is incorporated by reference herein in its entirety). This Cry Bt TP is insecticidal against the genus of lygus plant-feeding insects. The exemplified Cry Bt TP is useful in the present invention, for example, as a TP in an insecticidal and/or nematicidal protein, or a plant or plant part thereof comprising said insecticidal and/or nematicidal polypeptide and protein, for example a plant cell, a plant tissue or plant seed.

[0200] In various embodiments, isolated nucleic acid molecules corresponding to Bt TP encoding nucleic acid sequences are provided. Additionally, amino acid sequences corresponding to the polynucleotides are encompassed. In particular, the present invention provides for an isolated nucleic acid molecule comprising a nucleotide sequence encoding the amino acid sequence shown in US 2009/0099081, published on Apr. 18, 2009, all of which is herein incorporated by reference in its entirety, and all sequences identified by number specifically incorporated by reference. Various insecticidal polypeptides and polynucleotides encoding same as disclosed in US 2009/0099081, for example, SEQ ID NOs: 9, 11, 13, 15, or 18, or a nucleotide sequence set forth in SEQ ID NOs: 1, 2, 4, 6, 7, 8, 10, 12, 14, 16, or 17, as well as variants and fragments thereof are incorporated herein by reference in its entirety. Nucleotide sequences that are complementary to a nucleotide sequence of the invention, or that hybridize to a sequence of the invention are also encompassed.

[0201] Nucleotide sequences encoding the proteins of the present invention include the sequences set forth in US 2009/0099081, published on Apr. 18, 2009, including SEQ ID NOs: 1, 2, 4, 6, 7, 8, 10, 12, 14, 16, or 17, and variants, fragments, and complementary nucleotide sequences thereof of US 2009/0099081 are incorporated herein by reference in their entirety. The term “complementary sequence” is intended a nucleotide sequence that is sufficiently complementary to a given nucleotide sequence such that it can hybridize to the given nucleotide sequence to thereby form a stable duplex. Illustrative Bt protein amino acid sequences that may be used as a TP for the compositions, transgenic molecules (polynucleotides and proteins) are set forth in the present disclosure set forth as SEQ ID NOs: 33-533.

[0202] Nucleic acid molecules that are fragments of these Bt protein encoding nucleotide sequences are also encompassed by the present invention (for example, US 2009/0099081, published on Apr. 18, 2009, all of which is herein incorporated by reference in its entirety, and all sequences identified by number specifically incorporated by reference from US 2009/0099081.

[0203] SEQ ID NO: 8 is a fragment of SEQ ID NOs: 4 and 12; SEQ ID NO: 4 is a fragment of SEQ ID NO: 2 as disclosed in US 2009/0099081). By “fragment” is intended a portion of the nucleotide sequence encoding a Bt protein. A fragment of a nucleotide sequence may encode a biologically active portion of a Bt protein, or it may be a fragment that can be used as a hybridization probe or PCR primer using methods disclosed below. Nucleic acid molecules that are fragments of a Bt protein nucleotide sequence comprise at least about 50, 100, 200, 300, 400, 500, 600, 700, 800, 900, 1000, 1050, 1100, 1150, 1200, 1250, 1300, 1350, 1400, 1450, 1500, 1550, 1600, 1650, 1700, 1750, 1800, 1850, 1860, 1870, 1880, 1885 contiguous nucleotides, or up to the number of nucleotides present in a full-length Bt-protein encoding nucleotide sequence disclosed herein (for example, 1890 nucleotides for US 2009/0099081, published on Apr. 18, 2009, Here these are provided as SEQ ID NOs: 1 and 2, 1806 nucleotides for SEQ ID NO: 4, 1743 nucleotides for SEQ ID NOs: 6, 7, 8, and 16, 1809 nucleotides for SEQ ID NO: 10, and 1752 nucleotides for SEQ ID NOs: 12 and 14, in the sequence listing of US 2009/0099081). By “contiguous” nucleotides is intended nucleotide residues that are immediately adjacent to one another. Fragments of the nucleotide sequences of the present invention will encode protein fragments that retain the biological activity of the Bt protein and, hence, retain pesticidal activity. By “retains activity” is intended that the fragment will have at least about 30%, at least about 50%, at least about 70%, 80%, 90%, 95% or higher of the pesticidal activity of the Bt protein. Methods for measuring pesticidal activity are well known in the art. See, for example, Czapla and Lang (1990) J. Econ.

[0204] Entomol. 83:2480-2485; Andrews et al. (1988) Biochem. J. 252:199-206; Marrone et al. (1985) J. of Economic Entomology 78:290-293; and U.S. Pat. No. 5,743,477, all of which are incorporated herein by reference in their entireties, and all sequences identified by number specifically incorporated by reference.

[0205] A fragment of a Bt protein encoding nucleotide sequence that encodes a biologically active portion of a protein of the invention will encode at least about 15, 25, 30, 50, 75, 100, 125, 150, 175, 200, 250, 300, 350, 400, 450, 500, 550, 560, 570, 575, 580, 585, 590, 595, 600 contiguous amino acids, or up to the total number of amino acids present in a full-length Bt protein of the invention (for example, 580 amino acids for SEQ ID NO: 41, 602 amino acids for SEQ ID NO: 43, and 583 amino acids for SEQ ID NOs: 45 and 47).

[0206] Preferred Bt protein proteins of the present invention are encoded by a nucleotide sequence sufficiently identical to the nucleotide sequence of US 2009/0099081, published on Apr. 18, 2009, all of which is herein incorporated by reference in its entirety, and all sequences identified by number specifically incorporated by reference, sequences 1, 2, 4, 6, 7, 8, 10, 12, 14, 16, or 17. By “sufficiently identical” is intended an amino acid or nucleotide sequence that has at least about 60% or 65% sequence identity, about 70% or 75% sequence identity, about 80% or 85% sequence identity, about 90%, 91%, 92%, 93%, 94%, 95%, 96%, 97%, 98%, 99% or greater sequence identity compared to a reference sequence using one of the alignment programs described herein using standard parameters. One of skill in the art will recognize that these values can be appropriately adjusted to determine corresponding identity of proteins encoded by two nucleotide sequences by taking into account codon degeneracy, amino acid similarity, reading frame positioning, and the like.

[0207] The invention also encompasses variant nucleic acid molecules (for example, US 2009/0099081, published on Apr. 18, 2009, all of which is herein incorporated by reference in its entirety, and all sequences identified by number specifically incorporated by reference, sequence 2 is a variant of sequence 1; sequences 7 and 8 are variants of sequence 6; sequence 10 is a variant of sequences 4 and 12; and sequence 14 is a variant of sequence 12). “Variants” of the Bt protein encoding nucleotide sequences include those sequences that encode the Bt protein disclosed herein but that differ conservatively because of the degeneracy of the genetic code as well as those that are sufficiently identical as discussed above.

[0208] Naturally occurring allelic variants can be identified with the use of well-known molecular biology techniques, such as polymerase chain reaction (PCR) and hybridization techniques as outlined below. Variant nucleotide sequences also include synthetically derived nucleotide sequences that have been generated, for example, by using site-directed mutagenesis but which still encode the Bt proteins disclosed in the present invention as discussed below. Variant proteins encompassed by the present invention are biologically active, that is they continue to possess the desired biological activity of the native protein that is, retaining insecticidal and/or nematicidal activity (also known as pesticidal activity). By “retains activity” is intended that the variant will have at least about 30%, or at least about 40%, or at least about 50%, or at least about 60%, or at least about 70%, or at least about 80%, or at least about 90% of the pesticidal activity of the native protein. Methods for measuring pesticidal activity are well known in the art. See, for example, Czapla and Lang (1990) J. Econ. Entomol. 83: 2480-2485; Andrews et al. (1988) Biochem. J. 252:199-206; Marrone et al. (1985) J. of Economic Entomology 78:290-293; and U.S. Pat. No. 5,743,477, all of which are incorporated herein by reference in their entireties, and all sequences identified by number specifically incorporated by reference.

[0209] In one aspect of the invention, some TPs that can be employed in the design and synthesis of insecticidal and/or nematicidal proteins containing cleavable linking molecules (i.e. binary and tertiary peptides) can include one or more synthetic axmi-004 Bt protein sequences, such as those disclosed in US 2009/0099081, published on Apr. 18, 2009, all of which are incorporated herein by reference in their entireties, and all sequences identified by number specifically incorporated by reference, (sequence 1) and synaxmi-004B (sequence 2). These synthetic sequences have an altered DNA sequence relative to the axmi-004 sequence (sequence 3) recited in U.S. Pat. No. 7,355,099, all of which is herein incorporated by reference in its entirety, and all sequences identified by number specifically incorporated by reference), and encode the original AXMI-004 protein.

[0210] Likewise, synaxmi-004B-2M (sequence 4) was designated and encodes the axmi-004 alternate start site (herein referred to as axmi-004B-2M and set forth in sequence 5) originally identified in U.S. patent application Ser. No. 10/782,020.

[0211] Additional TPs included as possible designated axmi-004B-3M (US 2009/0099081, published on Apr. 18, 2009, all of which is herein incorporated by reference in its entirety, and all sequences identified by number specifically incorporated by reference, sequence 16) and encodes the AXMI-004B-3M amino acid sequence set forth in sequence 9. Synthetic sequences encoding the AXMI-004B-3M protein were also designated. These synthetic nucleotide sequences were designated synaxmi-004B-3M, synaxmi-004C-3M, and synaxmi-004D-3M and are set forth in sequences 6, 7, and 8, respectively. In another aspect of the invention, modified versions of the nucleotide sequence encoding AXMI-004B-3M protein were designed such that additional N-terminal residues are added to the encoded protein. These sequence are designated synaxmi-004B-3M-alt1 (US 2009/0099081, published on Apr. 18, 2009, sequence 10), synaxmi-004B-3M-alt2 (sequence 12), synaxmi-004B-3M-alt3 (sequence 14), and synaxmi-004B-3M-alt4 (sequence 17).

[0212] The encoded proteins are designated AXMI-004B-3M-ALT1 (sequence 11), AXMI-004B-3M-ALT2 (sequence 13), AXMI-004B-3M-ALT3 (sequence 15), and AXMI-004B-3M-ALT4 (sequence 18).

[0213] Other Bt proteins and gene descriptions can be found in the following. Each and every patent publication referred to below with a note as to the Bt toxin to which the publication refers to, is hereby incorporated by reference in its entirely. These documents have also published and they and their sequences are in the public domain.

[0214] Additional examples of Bt genes, proteins suitable as polynucleotides encoding TPs and TPs of the present invention, and the patent documents that describe them are found in Tables 1, 2, and 3 below. The patent documents in Tables 1, 2, 3, in particular the US Patents and US applications, are hereby incorporated by reference herein in their entireties.

TABLE 1
(e) Bt Toxins

| Toxin | Patents or Patent Publication Number |
|---|---|
| Cry1 | US2003046726, U.S. Pat. No. 6,833,449, |
| | CN1260397, US201026939, |
| | US2006174372, US2006174372, |
| | U.S. Pat. No. 642,241, U.S. Pat. No. 6,229,004, |
| | US2004194165, U.S. Pat. No. 6,573,240, |
| | U.S. Pat. No. 5,424,409, U.S. Pat. No. 5,407,825, |
| | U.S. Pat. No. 5,135,867, U.S. Pat. No. 5,055,294, |
| Cry1 | WO2007107302, U.S. Pat. No. 6,855,873, |
| | WO2004020636, US2007061919, |
| | U.S. Pat. No. 6,048,839, US2007061919, |
| | AU784649B, US2007061919, U.S. Pat. No. 6,150,589, |
| | U.S. Pat. No. 5,679,343, U.S. Pat. No. 5,616,319, U.S. Pat. No. |
| | 5,322,687, |
| Cry1 | WO2007107302, US2006174372, |
| | US2005091714, US2004058860, |
| | US2008020968, U.S. Pat. No. 6,043,415, U.S. Pat. No. |
| | 5,942,664, |
| Cry1 | WO2007107302, US2007061919, |
| | U.S. Pat. No. 6,172,281, |
| Cry1 | WO03082910, MX9606262, U.S. Pat. No. 5,530,195, |
| | U.S. Pat. No. 5,407,825, U.S. Pat. No. 5,045,469, |
| Cry1 | US2006174372, |
| Cry1 | US2007061919, |
| Cry1 | US2007061919, |
| Cry1 | US2007061919, CN1401772, U.S. Pat. No. 6,063,605, |
| Cry1 | US2007061919, AU784649B, U.S. Pat. No. 5,723,758, |
| | U.S. Pat. No. 5,616,319, U.S. Pat. No. 5,356,623, U.S. Pat. No. |
| | 5,322,687 |
| Cry1 | U.S. Pat. No. 5,723,758 |
| Cry2 | CN1942582, WO9840490, |
| | US2007061919, UA75570, |
| | MXPA03006130, US2003167517, |
| | U.S. Pat. No. 6,107,278, U.S. Pat. No. 6,096,708, U.S. Pat. No. |
| | 5,073,632, |
| | U.S. Pat. No. 7,208,474, U.S. Pat. No. 7,244,880, |
| Cry3 | US2002152496, RU2278161, |
| | US2003054391, |
| Cry3 | U.S. Pat. No. 5,837,237, U.S. Pat. No. 5,723,756, U.S. Pat. No. |
| | 5,683,691, |
| | U.S. Pat. No. 5,104,974, U.S. Pat. No. 4,996,155, |
| Cry3 | U.S. Pat. No. 5,837,237, U.S. Pat. No. 5,723,756, |
| Cry5 | WO9840491, US2004018982, U.S. Pat. No. 6,166,195, |
| | US2001010932, U.S. Pat. No. 5,985,831, U.S. Pat. No. |
| | 5,824,792, |
| | U.S. Pat. No. 528,153 |
| Cry5 | WO2007062064, US2001010932, |
| | U.S. Pat. No. 5,824,792, |
| Cry6 | WO2007062064, US2004018982, |
| | U.S. Pat. No. 5,973,231, U.S. Pat. No. 5,874,288, U.S. Pat. No. |
| | 5,236,843, |
| | U.S. Pat. No. 683,106 |
| Cry6 | US2004018982, U.S. Pat. No. 6,166,195, |
| Cry7 | U.S. Pat. No. 6,048,839, U.S. Pat. No. 5,683,691, U.S. Pat. No. |
| | 5,378,625, |
| | U.S. Pat. No. 518,709 |
| Cry7 | CN195215 |
| Cry8 | |
| Cry8 | |
| Cry8 | US200301796 |
| Cry8 | WO2006053473, US2007245430, |
| Cry8 | WO200605347 |
| Cry9 | US2007061919, |
| Cry9 | WO200506620 |
| Cry9 | US2007061919, U.S. Pat. No. 6,448,226, |
| | US2005097635, WO2005066202, |
| | U.S. Pat. No. 6,143,550, U.S. Pat. No. 6,028,246, U.S. Pat. No. |
| | 6,727,409, |
| Cry9 | US2005097635, WO2005066202, |
| Cry9 | U.S. Pat. No. 6,570,005, |
| Cry9 | AU784649B, US2007074308, |
| | U.S. Pat. No. 736,180 |
| Cry11 | MXPA0200870 |
| Cry12 | US2004018982, U.S. Pat. No. 6,166,195, |
| | U.S. Pat. No. 6,077,937, U.S. Pat. No. 5,824,792, U.S. Pat. No. |
| | 5,753,492, |
| Cry13 | US2004018982, U.S. Pat. No. 6,166,195, |
| | U.S. Pat. No. 6,077,937, U.S. Pat. No. 5,824,792, U.S. Pat. No. |
| | 5,753,492, |
| Cry14 | JP2007006895, U.S. Pat. No. 5,831,011, |
| Cry21 | U.S. Pat. No. 5,831,011, U.S. Pat. No. 5,670,365, |
| Cry22 | US2006218666, US2001010932, |
| | MXPA01004361, U.S. Pat. No. 5,824,792, |
| Cry22 | US2003229919, |
| Cry23 | US2006051822, US2003144192, |
| | UA75317, U.S. Pat. No. 6,399,330, U.S. Pat. No. 6,326,351, |
| | U.S. Pat. No. 6,949,626, |
| Cry26 | US200315001 |
| Cry28 | US200315001 |
| Cry31 | CA2410153, |
| Cry34 | US200316752 |
| Cry35 | US2003167522, |
| Cry37 | US2006051822, US2003144192, |
| | UA75317, U.S. Pat. No. 6,399,330, U.S. Pat. No. 6,326,351, |
| | U.S. Pat. No. 6,949,626, |
| Cry43 | US200527164 |
| Cyt1 | WO2007027776, |
| Cyt1 | U.S. Pat. No. 6,150,165, |
| Cyt2 | US2007163000, EP1681351, |
| | U.S. Pat. No. 6,686,452, U.S. Pat. No. 6,537,756, |

TABLE 2
(f) Hybrid Insecticidal Crystal Proteins and Patents

| Patents^{a} | Holotype Toxin^{b} |
|---|---|
| US2008020967 | Cry29A^{a} |
| US2008040827 | Cry1C^{a} |
| US2007245430 | Cry8A^{a} |
| US2008016596 | Cry8A^{a} |
| US2008020968 | Cry1C^{b} |

TABLE 3
(g) Patents Relating to Other Hybrid Insecticidal Crystal Proteins

| Source toxins^{a} | Patents^{b} |
|---|---|
| Cry1A, Cry1C | U.S. Pat. No. 5,593,881, U.S. Pat. No. 5,932,209 |
| Cry1C, Cry1A, Cry1F | U.S. Pat. No. 6,962,705, |
| | U.S. Pat. No. 7,250,501, US2004093637 |
| Cry23A, Cry37A | U.S. Pat. No. 7,214,788 |
| Cry1A | U.S. Pat. No. 7,019,197 |
| Cry1A, Cry1B | U.S. Pat. No. 6,320,100 |
| Cry1A, Cry1C | AU2001285900B |
| Cry23A, Cry37A | US2007208168 |
| Cry3A, Cry1I, Cry1B | WO0134811 |
| Cry3A, Cry3B, Cry3C | US2004033523 |
| Cry1A, Cry1C, Cry1E, | U.S. Pat. No. 6,780,408 |
| Cry1A, Cry1F | US2008047034 |

[0215] The sequence listing of the present disclosure includes exemplary Bt TP amino acid sequences SEQ ID NOs: 33-533. These amino acid sequences include examples of Bt protein Cry and Cyt protein sequences. Examples are numerous and one skilled in the art would know of many other examples of various Bt sequences that are suitable substitutes for those in this disclosure.

[0216] (3B). TMOF TPs

[0217] In some embodiments, another source of TPs can include: Trypsin modulating oostatic factor (TMOF) peptides. TMOF peptides have to be delivered to their physiological site of action in various ways, and TMOF peptides have been identified as a potential larvicides, with great potential, see D. Borovsky, Journal of Experimental Biology 206, 3869-3875, the disclosure of which is incorporated herein by reference in its entirety.

[0218] In various embodiments, illustrative TPs include the ICK motif TP which can be any polypeptide or protein with the ICK motif ranging in length between 16 and 60 amino acids, with at least 6 cysteine residues that create covalent cross-linking disulfide bonds in the proper order.

[0219] In various embodiments, illustrative TPs include the CRIP TPs for example the ICK TPs for example, an ICK TP derived from, or originates from, Hadronyche versuta, or the Blue Mountain funnel web spider, Atrax robustus, Atrax formidabilis, Atrax infensus, including TPs known as U-ACTX polypetides, U-ACTX-Hv1a, rU-ACTX-Hv1a, rU-ACTX-Hv1b, or mutants or variants, Omega-ACTX polypeptides and variants and Kappa-ACTX polypeptides and variants.

[0220] In some embodiments, illustrative CRIP TPs include a Non-ICK CRIP TP, for example, a Non-ICK CRIP TP derived from, or originates from, animals having Non-ICK CRIPS such as sea anemones, sea urchins and sea slugs and variants thereof. In one exemplary embodiment, a Non-ICK CRIP TP can be a TP derived from the sea anemone named Anemonia viridi, optionally including the TPs named Av2 and Av3 especially TPs similar to Av2 and Av3 including such peptides listed in the sequence listing of the present applicationor mutants or variants thereof.

[0221] In other embodiments, other TPs that can be used in the recombinant constructs and insecticidal and/or nematicidal proteins and plants described herein can include one or more of an ACTX protein, and/or a TMOF protein. TMOF motif,” or “TMOF proteins” include trypsin modulating oostatic factor peptide. Numerous examples and variants of TMOF TPs are provided. SEQ ID NO: 708 in the present application is an exemplary wild type TMOF sequence. Other non-limiting variants are provided in SEQ ID NOs: 709-721. Other examples are known or could be created guided by the knowledge known in the field by one skilled in the art.

[0222] (3C). Cleavable Bt TPs

[0223] In some embodiments, a representative Bt toxic protein (TP) can include a cleavable Bt TP as provided herein that comprises a binary or tertiary peptide inserted between the active and inactive portions of the Bt TP. In one example, a binary or tertiary peptide is inserted between the cleavable pro inactive portion of the peptide and mature active portion of the peptide. In another example, a Bt TP includes a stabilizing domain fused in frame with a binary or tertiary peptide of the present invention which is fused in frame with the active portion of the Bt TP. In another example, the Bt TPs are frequently written as “cry”, “cyt” or “VIP” proteins encoded by the cry, cyt and vip genes. Bt TPs are more usually attributed to insecticidal crystal proteins encoded by the cry genes. Bt TPs are examples of PFIPS (Pore Forming Insecticidal Proteins). In various embodiments, an insecticidal and/or nematicidal protein may include a protein that includes two or more binary or tertiary peptides and at least one Bt TP fused in frame with the one or more binary and/or tertiary peptides, In some embodiments, the insecticidal and/or nematicidal protein useful to provide insecticidal and/or nematicidal compositions when ingested and exposed to gut or hemolymph environments can contain a Bt TP and/or a cleavable Bt TP as described above, and further exemplified herein, containing a binary or tertiary peptide inserted between the cleavable pro (inactive) portion of the TP and mature (active) portion of the TP.

[0224] For example, a binary or tertiary peptide when inserted between the cleavable pro inactive portion of the Bt TP and mature active portion of the Bt TP provides a cleavable Bt TP that upon ingestion and contact with an insect or nematode gut protease results in the cleavage of the cleavable Bt TP (See FIG. 3B). In some embodiments, an insecticidal and/or nematicidal protein containing cleavable and/or non-cleavable Bt TPs can be encoded by a DNA construct that when transformed into plants, or parts thereof, or when applied directly to the surface of plants provide insecticidal and/or nematicidal activity when the insecticidal and/or nematicidal protein is ingested and exposed to the gut and/or hemolymph environment of a target insect and/or nematode.

[0225] Described and incorporated by reference to the TPs identified herein are variants or mutant peptides and proteins of the TP amino acid sequences mentioned above, specifically, peptides and proteins having an amino acid sequence as shown in SEQ ID NO: 5-1593 and 1761-1775, having homology or sequence identity to such sequences or referred to herein, which are also identified and claimed as suitable for making special according to the processes described herein, including all homologous sequences having at least any of the following percent identities to any of the sequences disclosed here or to any sequence incorporated by reference: 50%, 55%, 60%, 65%, 70%, 75%, 80%, 85%, 90%, 95%, 96%, 97%, 98%, or 99% or greater amino acid sequence identity or 100% amino acid sequence identity to any and all sequences identified in the patents noted above, and to any other sequence identified herein, including each and every sequence in the sequence listing of this application. When the term homologous or homology is used herein with a number such as 50% or greater, then what is meant is percent identity or percent similarity between the two peptides. When homologous or homology is used without a numeric percent then it refers to two peptide sequences that are closely related in the evolutionary or developmental aspect in that they share common physical and functional aspects, like topical toxicity and similar size (i.e., the homolog being within 100% greater length or 50% shorter length of the peptide specifically mentioned herein or identified by reference herein as above). TPs of the present invention also include variants of TPs specifically disclosed or described herein, The term “variant” means a polypeptide or protein having insecticidal and/or nematicidal activity comprising an alteration, i.e., a substitution, insertion, and/or deletion, at one or more (e.g., several) positions. A substitution means replacement of the amino acid occupying a position with a different amino acid; a deletion means removal of the amino acid occupying a position; and an insertion means adding an amino acid adjacent to and immediately following the amino acid occupying a position. The TP variants of the present invention have at least 20%, e.g., at least 40%, at least 50%, at least 60%, at least 70%, at least 80%, at least 90%, at least 95%, or at least 100% of the insecticidal and/or nematicidal activity of the polypeptides and proteins of SEQ ID NO: 5-1593 and 1761-1775 and the other specifically identified TPs disclosed herein. The variants of the present invention have at least 20%, e.g., at least 40%, at least 50%, at least 60%, at least 70%, at least 80%, at least 90%, at least 95%, or at least 100% of the insecticidal and/or nematicidal activity of any one polypeptide or protein of SEQ ID NOs: 5-1593 and 1761-1775.

[0226] TPs may also include variant TP peptides and proteins encoded by a polynucleotide having one or more point mutations, for example, 1, 2, 3, 4, 5, 6, 7, 8, 9, or 10 point mutations or more, such that when the mutated TP encoding polynucleotide is transcribed and/or translated, the expressed mutated TP peptide or protein retains insecticidal and/or nematicidal activity that is at least: 90%, or 80%, or 70%, or 60%, or 50% of the insecticidal and/or nematicidal activity of the peptide or protein encoded by the corresponding non-mutated TP polynucleotide. TPs of the present invention may also include TP peptides and proteins that have at least 80%, or at least 85%, or at least 90%, or at least 95%, or at least 96% or at least 97% or at least 98% or at least 99% amino acid sequence identity to any TP disclosed in SEQ ID NO: 5-1593 and 1761-1775, and still retains at least: 95%, or 90%, or 80%, or 70%, or 60%, or 50% of the insecticidal and/or nematicidal activity of the corresponding TP set forth in SEQ ID NO: 5-1593 and 1761-1775.

[0227] The variant TPs may further comprise one or more additional substitutions at one or more (e.g., several) other positions. The amino acid changes may be of a minor nature, that is conservative amino acid substitutions or insertions that do not significantly affect the folding and/or activity of the peptide or the protein; small deletions, typically of 1-30 amino acids; small amino- or carboxyl-terminal extensions, such as an amino-terminal methionine residue; or a small extension that facilitates purification by changing net charge or another function, such as a poly-histidine tract, an antigenic epitope or a binding domain. Examples of conservative substitutions are within the groups of basic amino acids (arginine, lysine and histidine), acidic amino acids (glutamic acid and aspartic acid), polar amino acids (glutamine and asparagine), hydrophobic amino acids (leucine, isoleucine and valine), aromatic amino acids (phenylalanine, tryptophan and tyrosine), and small amino acids (glycine, alanine, serine, threonine and methionine). Amino acid substitutions that do not generally alter specific activity are known in the art and are described, for example, by H. Neurath and R. L. Hill, 1979, In, The Proteins, Academic Press, New York. Common substitutions are Ala/Ser, Val/Ile, Asp/Glu, Thr/Ser, Ala/Gly, Ala/Thr, Ser/Asn, Ala/Val, Ser/Gly, Tyr/Phe, Ala/Pro, Lys/Arg, Asp/Asn, Leu/Ile, Leu/Val, Ala/Glu, and Asp/Gly. Alternatively, the amino acid changes are of such a nature that the physico-chemical properties of the polypeptides are altered. For example, amino acid changes may improve the thermal stability of the polypeptide, alter the substrate specificity, change the pH optimum, and the like.

[0228] Essential amino acids in a peptide or protein can be identified according to procedures known in the art, such as site-directed mutagenesis or alanine-scanning mutagenesis (Cunningham and Wells, 1989, Science 244:1081-1085). In the latter technique, single alanine mutations are introduced at every residue in the molecule, and the resultant mutant molecules are tested for insecticidal or nematicidal activity to identify amino acid residues that are critical to the activity of the molecule. See also, Hilton et al., 1996, J. Biol. Chem. 271: 4699-4708. The active site of insecticidal and/or nematicidal peptide or protein or other biological interaction can also be determined by physical analysis of structure, as determined by such techniques as nuclear magnetic resonance, crystallography, electron diffraction, or photoaffinity labeling, in conjunction with mutation of putative contact site amino acids. See, for example, de Vos et al., 1992, Science 255:306-312; Smith et al., 1992, J. Mol. Biol. 224:899-904; Wlodaver et al., 1992, FEBS Lett. 309:59-64. The identity of essential amino acids can also be inferred from an alignment with a related TP peptide or protein as disclosed herein and/or as set forth in SEQ ID NOs: 5-1593 and 1761-1775.

[0229] TPs of the present invention may also include TP peptides and proteins having 1-6 amino acid extensions fused in frame to the N-terminus or C-terminus or both termini of any TP described herein, for example a TP having an amino acid sequence as set forth in SEQ ID NOs: 5-1593 and 1761-1775. The variants can be prepared using any mutagenesis procedure known in the art, such as site-directed mutagenesis, synthetic gene construction, semi-synthetic gene construction, random mutagenesis, shuffling, etc.

[0230] Site-directed mutagenesis is a technique in which one or more (e.g., several) mutations are introduced at one or more defined sites in a polynucleotide encoding the parent. Site-directed mutagenesis can be accomplished in vitro by PCR involving the use of oligonucleotide primers containing the desired mutation. Site-directed mutagenesis can also be performed in vitro by cassette mutagenesis involving the cleavage by a restriction enzyme at a site in the plasmid comprising a polynucleotide encoding the parent and subsequent ligation of an oligonucleotide containing the mutation in the polynucleotide. Usually the restriction enzyme that digests the plasmid and the oligonucleotide is the same, permitting sticky ends of the plasmid and the insert to ligate to one another. See, e.g., Scherer and Davis, 1979, Proc. Natl. Acad. Sci. USA 76:4949-4955; and Barton et al., 1990, Nucleic Acids Res. 18:7349-4966. Site-directed mutagenesis can also be accomplished in vivo by methods known in the art. See, e.g., U.S. Patent Application Publication No. 2004/0171154; Storici et al., 2001, Nature Biotechnol. 19:773-776; Kren et al., 1998, Nat. Med. 4:285-290; and Calissano and Macino, 1996, Fungal Genet. Newslett. 43:15-16. Any site-directed mutagenesis procedure can be used in the present invention. There are many commercial kits available that can be used to prepare variant TPs of the present invention.

[0231] Synthetic gene construction entails in vitro synthesis of a designed polynucleotide molecule to encode a polypeptide of interest. Gene synthesis can be performed utilizing a number of techniques, such as the multiplex microchip-based technology described by Tian et al. (2004, Nature 432:1050-1054) and similar technologies wherein oligonucleotides are synthesized and assembled upon photo-programmable microfluidic chips.

[0232] Single or multiple amino acid substitutions, deletions, and/or insertions can be made and tested using known methods of mutagenesis, recombination, and/or shuffling, followed by a relevant screening procedure, such as those disclosed by Reidhaar-Olson and Sauer, 1988, Science 241:53-57; Bowie and Sauer, 1989, Proc. Natl. Acad. Sci. USA 86:2152-2156; WO 95/17413; or WO 95/22625. Other methods that can be used include error-prone PCR, phage display (e.g., Lowman et al., 1991, Biochemistry 30:10832-10837; U.S. Pat. No. 5,223,409; WO 92/06204) and region-directed mutagenesis (Derbyshire et al., 1986, Gene 46:145; Ner et al., 1988, DNA 7:127).

[0233] Mutagenesis/shuffling methods can be combined with high-throughput, automated screening methods to detect activity of cloned, mutagenized polypeptides expressed by host cells (Ness et al., 1999, Nature Biotechnology 17:893-896). Mutagenized DNA molecules that encode active polypeptides can be recovered from the host cells and rapidly sequenced using standard methods in the art. These methods allow the rapid determination of the importance of individual amino acid residues in a peptide or protein.

[0234] Semi-synthetic gene construction is accomplished by combining aspects of synthetic gene construction, and/or site-directed mutagenesis, and/or random mutagenesis, and/or shuffling. Semi-synthetic construction is typified by a process utilizing polynucleotide fragments that are synthesized, in combination with PCR techniques. Defined regions of genes may thus be synthesized de novo, while other regions may be amplified using site-specific mutagenic primers, while yet other regions may be subjected to error-prone PCR or non-error prone PCR amplification. Polynucleotide subsequences may then be shuffled.

[0235] For purposes of describing the insecticidal and/or nematicidal peptides, proteins, polynucleotides encoding such insecticidal and/or nematicidal peptides and proteins, DNA constructs encoding such insecticidal and/or nematicidal peptides and proteins, transgenic plants or parts thereof containing such insecticidal and/or nematicidal peptides and proteins, and methods for controlling a pest infection or infestation and methods for increasing the yield of a crop incorporating such insecticidal and/or nematicidal peptides and proteins, TPs of the present invention also encompass (includes within its definition) variant and mutant and mutated TPs as described above within the definition of a TP or toxic peptide. In various embodiments, a TP specifically described herein include any TP having an amino acid sequence as set forth in SEQ ID NOs: 5-1593 and 1761-1775, any TP recited in any patent or non-patent reference described herein and any variant or mutant or mutated peptide or protein thereof. IN various embodiments, an insecticidal and/or nematicidal proteins described herein, include a TP having at least 80%, at least 85%, at least 90%, at least 95%, at least 96%, at least 97%, at least 98%, at least 99%, or at least 100% sequence identity or sequence homology to a peptide having an amino acid sequence as set forth in SEQ ID NOs: 5, 6 and 1761, 1762, 1767, 1771-1773, and variants thereof.

[0236] (4). Recombinant Insecticidal & Nematicidal Peptide DNA Compositions

[0237] In various embodiments, the present invention provides insecticidal and nematicidal polypeptides, proteins and DNA constructs and polynucleotides encoding such polypeptides and proteins. DNA constructs encoding such insecticidal and nematicidal polypeptides, and proteins may encompass a single polynucleotide containing the open reading frame (ORF) encoding one long fusion protein, or may encompass a number of polynucleotides which when provided in a vector enables the transcription of mRNA that encodes such insecticidal and nematicidal polypeptides as described herein. The DNA construct may also contain the necessary regulatory elements such as promoters, termination sequences, enhancers and antibiotic resistance genes that permit the DNA construct or portions thereof to be efficiently transcribed and translated in a host cell. In some embodiments, a DNA construct of the present invention can include a polynucleotide operably linked to an operable promoter, for example, a homologous or heterologous promoter, wherein the polynucleotide encodes: an insecticidal and/or nematicidal peptide comprising either a binary or a tertiary peptide, the binary or a tertiary peptide containing at least 4 amino acids and up to a maximum of 16 amino acids, and is comprised of 2 or 3 different regions, wherein the binary peptide has 2 different regions and the tertiary peptide has 3 different regions. The binary or a tertiary peptide can be cleaved by both an animal gut protease and an insect and/or nematode gut protease. In various embodiments the binary or a tertiary peptide is operably fused (i.e. fused in frame) to the C-terminus of an Endoplasmic Reticulum Signal Peptide (ERSP) as described herein and is operably fused to the N-terminus of a TP, for example a CRIP TP. (See for example, FIGS. 4-6C). In related embodiments of the above, TPs useful in the manufacture of a recombinant insecticidal and/or nematicidal protein, which may include one or more ICK TPs, for example, a TP selected from an “ACTX” or “ACTX peptide” family of insecticidal ICK peptides that have been isolated from an Australian funnel-web spiders belonging to the Atracinae subfamily, for example, one or more TPs selected from an Omega-ACTX TP, a Kappa-ACTX TP and an U-ACTX TP, for example, U+2-ACTX-Hv1a, U-ACTX-Hv1a, rU-ACTX-Hv1a, rU-ACTX-Hv1b, or a TP having at least 80%, at least 85%, at least 90%, at least 95%, at least 96%, at least 97%, at least 98%, at least 99%, or at least 100% sequence identity or sequence homology to a peptide or protein having an amino acid sequence as set forth in SEQ ID NOs: 5, 6 and 1761, 1762, 1767, 1771-1773, and variants thereof, (wherein the TPs, if more than one, may be the same or different) and each insecticidal and/or nematicidal protein further comprising one or more tertiary peptides (designated above as L), which may include the amino acid sequence of a binary peptide selected from IFVRLR (SEQ ID NO: 1619), ALKLFV (SEQ ID NO: 1605), ALKFLV (SEQ ID NO: 1603), RRKAFV (SEQ ID NO: 1644), or LFAAPF (SEQ ID NO: 1621), fused in frame either on the N-terminus, C-terminus or both termini of the binary peptide with a Z region or spacer sequence selected from the group of or consisting of GS, WN, WQ, MA, MV, AM, LH, MN, ES, WQ, or DT.

[0238] (4A). DNA Constructs Encoding Insecticidal and Nematicidal Transgenic Proteins

[0239] In various embodiments, an illustrative DNA construct encoding the insecticidal and/or nematicidal protein may be codon optimized for the species in which the DNA construct will be introduced. For example, where the DNA construct will be transformed into plants, the DNA construct can be codon optimized for expression and replication in plant cells.

[0240] In some embodiments, the DNA construct comprises a polynucleotide that encodes a binary peptide comprising the amino acid sequence: X₁-X₂-Y₁-Y₂, X₁-X₂-X₃-Y₁-Y₂, X₁-X₂-X₃-X₄—Y₁-Y₂, X₁-X₂-Y₁-Y₂-Y₃, X₁-X₂-X₃-Y₁-Y₂-Y₃, X₁-X₂-X₃-X₄-Y₁-Y₂-Y₃, X₁-X₂-Y₁-Y₂-Y₃-Y₄, X₁-X₂-X₃-Y₁-Y₂-Y₃-Y₄, X₁-X₂-X₃-X₄-Y₁-Y₂-Y₃-Y₄, Y₁-Y₂-X₁-X₂, Y₁-Y₂-X₁-X₂-X₃, Y₁-Y₂-X₁-X₂-X₃-X₄, Y₁-Y₂-Y₃-X₁-X₂, Y₁-Y₂-Y₃-X₁-X₂-X₃, Y₁-Y₂-Y₃-X₁-X₂-X₃-X₄, Y₁-Y₂-Y₃-Y₄-X₁-X₂, Y₁-Y₂-Y₃-Y₄-X₁-X₂-X₃, Y₁-Y₂-Y₃-Y₄-X₁-X₂-X₃-X₄, wherein each Xₙ and each Yₙ is an amino acid, and wherein each Xn and each Yn is an amino acid, and wherein X₁ is selected from the group consisting of: (all single letter amino acid format) A, D, E, G, I, K, L, N, P, Q, R, and V; X₂ is selected from the group consisting of A, F, G, I, K, L, N, P, Q, R, S, T, V, and Y; X₃ is selected from the group consisting of A, D, E, F, G, I, K, L, N, Q, R, S, T, V, and Y; X₄ is selected from the group consisting of: R, H, K, D, E, S, T, N, Q, G, A, I, L, M, F, W, Y, and V. In some embodiments, Y₁ is selected from the group consisting of: (all single letter amino acid format) A, D, E, F, G, I, L, N, Q, S, T, V, and Y; Y₂ is selected from the group consisting of F, G, I, L, and Y; and Y₃ is selected from the group consisting of A, D, E, F, G, I, K, L, R, S, T, V, and Y; and Y₄ is selected from the group consisting of: R, H, K, D, E, S, T, N, Q, G, A, I, L, M, F, W, Y, and V.

[0241] In some embodiments, an illustrative DNA construct may encode an insecticidal and/or nematicidal protein comprising one or more illustrative binary peptides (XY or YX). In some embodiments, an exemplary DNA construct may encode an insecticidal and/or nematicidal protein comprising a cleavable binary peptide having the following amino acid sequence: AFVRLF (SEQ ID NO: 1594), AKLFV (SEQ ID NO: 1595), ALFALK (SEQ ID NO: 1596), ALFLK (SEQ ID NO: 1597), ALFLR (SEQ ID NO: 1598), ALFR (SEQ ID NO: 1599), ALFRLR (SEQ ID NO: 1600), ALKALF (SEQ ID NO: 1601), ALKFF (SEQ ID NO: 1602), ALKFLV (SEQ ID NO: 1603), ALKIFV (SEQ ID NO: 1604), ALKLFV (SEQ ID NO: 1605), FFADIK (SEQ ID NO: 1606), FFALK (SEQ ID NO: 1607), FFLK (SEQ ID NO: 1608), FFLR (SEQ ID NO: 1609), FFRLR (SEQ ID NO: 1610), FGYRIK (SEQ ID NO: 1611), FLRLF (SEQ ID NO: 1612), FYARR (SEQ ID NO: 1613), GGLRKK (SEQ ID NO: 1614), IFVALK (SEQ ID NO: 1615), IFVLK (SEQ ID NO: 1616), IFVLR (SEQ ID NO: 1617), IFVR (SEQ ID NO: 1618), IFVRLR (SEQ ID NO: 1619), ILFNIK (SEQ ID NO: 1620), LFAAPF (SEQ ID NO: 1621), LFVALK (SEQ ID NO: 1622), LFVLK (SEQ ID NO: 1623), LFVLR (SEQ ID NO: 1624), LFVR (SEQ ID NO: 1625), LFVRLR (SEQ ID NO: 1626), LFVRVFL (SEQ ID NO: 1627), LGER (SEQ ID NO: 1628), LKALF (SEQ ID NO: 1629), LKFF (SEQ ID NO: 1630), LKIFV (SEQ ID NO: 1631), LKLFV (SEQ ID NO: 1632), LRALF (SEQ ID NO: 1633), LRFF (SEQ ID NO: 1634), LRIFV (SEQ ID NO: 1635), LRLFV (SEQ ID NO: 1636), RALF (SEQ ID NO: 1637), RIFV (SEQ ID NO: 1638), RLFV (SEQ ID NO: 1639), RLRALF (SEQ ID NO: 1640), RLRFF (SEQ ID NO: 1641), RLRIFV (SEQ ID NO: 1642), RLRLFV (SEQ ID NO: 1643), RRKAFV (SEQ ID NO: 1644), RRKLIF (SEQ ID NO: 1645), RRRFFA (SEQ ID NO: 1646), VFGRKG (SEQ ID NO: 1647), and YFVRK (SEQ ID NO: 1648).

[0242] In various embodiments, an exemplary DNA construct may encode an insecticidal and/or nematicidal protein comprising a cleavable tertiary peptide having the following amino acid sequence construct: Z₁-X₁-X₂-Y₁-Y₂, Z₁-X₁-X₂-X₃-Y₁-Y₂, Z₁-X₁-X₂-X₃-X₄-Y₁-Y₂, Z₁-X₁-X₂-Y₁-Y₂-Y₃, Z₁-X₁-X₂-X₃-Y₁-Y₂-Y₃, Z₁-X₁-X₂-X₃-X₄-Y₁-Y₂-Y₃, Z₁-X₁-X₂-Y₁-Y₂-Y₃-Y₄, Z₁-X₁-X₂-X₃-Y₁-Y₂-Y₃-Y₄, Z₁-X₁-X₂-X₃-X₄-Y₁-Y₂-Y₃-Y₄, Z₁-Z₂-X₁-X₂-Y₁-Y₂, Z₁-Z₂-X₁-X₂-X₃-Y₁-Y₂, Z₁-Z₂-X₁-X₂-X₃-X₄-Y₁-Y₂, Z₁-Z₂-X₁-X₂-Y₁-Y₂-Y₃, Z₁-Z₂-X₁-X₂-X₃-Y₁-Y₂-Y₃, Z₁-Z₂-X₁-X₂-X₃-X₄-Y₁-Y₂-Y₃, Z₁-Z₂-X₁-X₂-Y₁-Y₂-Y₃-Y₄, Z₁-Z₂-X₁-X₂-X₃-Y₁-Y₂-Y₃-Y₄, Z₁-Z₂-X₁-X₂-X₃-X₄-Y₁-Y₂-Y₃-Y₄, Z₁-Z₂-Z₃-X₁-X₂-Y₁-Y₂, Z₁-Z₂-Z₃-X₁-X₂-X₃-Y₁-Y₂, Z₁-Z₂-Z₃-X₁-X₂-X₃-X₄-Y₁-Y₂, Z₁-Z₂-Z₃-X₁-X₂-Y₁-Y₂-Y₃, Z₁-Z₂-Z₃-X₁-X₂-X₃-Y₁-Y₂-Y₃, Z₁-Z₂-Z₃-X₁-X₂-X₃-X₄-Y₁-Y₂-Y₃, Z₁-Z₂-Z₃-X₁-X₂-Y₁-Y₂-Y₃-Y₄, Z₁-Z₂-Z₃-X₁-X₂-X₃-Y₁-Y₂-Y₃-Y₄, Z₁-Z₂-Z₃-X₁-X₂-X₃-X₄-Y₁-Y₂-Y₃-Y₄, Z₁-Z₂-Z₃-Z₄-X₁-X₂-Y₁-Y₂, Z₁-Z₂-Z₃-Z₄-X₁-X₂-X₃-Y₁-Y₂, Z₁-Z₂-Z₃-Z₄-X₁-X₂-X₃-X₄-Y₁-Y₂, Z₁-Z₂-Z₃-Z₄-X₁-X₂-Y₁-Y₂-Y₃, Z₁-Z₂-Z₃-Z₄-X₁-X₂-X₃-Y₁-Y₂-Y₃, Z₁-Z₂-Z₃-Z₄-X₁-X₂-X₃-X₄-Y₁-Y₂-Y₃, Z₁-Z₂-Z₃-Z₄-X₁-X₂-Y₁-Y₂-Y₃-Y₄, Z₁-Z₂-Z₃-Z₄-X₁-X₂-X₃-Y₁-Y₂-Y₃-Y₄, Z₁-Z₂-Z₃-Z₄-X₁-X₂-X₃-X₄-Y₁-Y₂-Y₃-Y₄, X₁-X₂-Y₁-Y₂-Z₁, X₁-X₂-X₃-Y₁-Y₂-Z₁, X₁-X₂-X₃-X₄-Y₁-Y₂-Z₁, X₁-X₂-Y₁-Y₂-Y₃-Z₁, X₁-X₂-X₃-Y₁-Y₂-Y₃-Z₁, X₁-X₂-X₃-X₄-Y₁-Y₂-Y₃-Z₁, X₁-X₂-Y₁-Y₂-Y₃-Y₄-Z₁, X₁-X₂-X₃-Y₁-Y₂-Y₃-Y₄-Z₁, X₁-X₂-X₃-X₄-Y₁-Y₂-Y₃-Y₄-Z₁, Z₁-X₁-X₂-Y₁-Y₂-Z₁, Z₁-X₁-X₂-X₃-Y₁-Y₂-Z₁, Z₁-X₁-X₂-X₃-X₄-Y₁-Y₂-Z₁, Z₁-X₁-X₂-Y₁-Y₂-Y₃-Z₁, Z₁-X₁-X₂-X₃-Y₁-Y₂-Y₃-Z₁, Z₁-X₁-X₂-X₃-X₄-Y₁-Y₂-Y₃-Z₁, Z₁-X₁-X₂-Y₁-Y₂-Y₃-Y₄-Z₁, Z₁-X₁-X₂-X₃-Y₁-Y₂-Y₃-Y₄-Z₁, Z₁-X₁-X₂-X₃-X₄-Y₁-Y₂-Y₃-Y₄-Z₁, Z₁-Z₂-X₁-X₂-Y₁-Y₂-Z₁, Z₁-Z₂-X₁-X₂-X₃-Y₁-Y₂-Z₁, Z₁-Z₂-X₁-X₂-X₃-X₄-Y₁-Y₂-Z₁, Z₁-Z₂-X₁-X₂-Y₁-Y₂-Y₃-Z₁, Z₁-Z₂-X₁-X₂-X₃-Y₁-Y₂-Y₃-Z₁, Z₁-Z₂-X₁-X₂-X₃-X₄-Y₁-Y₂-Y₃-Z₁, Z₁-Z₂-X₁-X₂-Y₁-Y₂-Y₃-Y₄-Z₁, Z₁-Z₂-X₁-X₂-X₃-Y₁-Y₂-Y₃-Y₄-Z₁, Z₁-Z₂-X₁-X₂-X₃-X₄-Y₁-Y₂-Y₃-Y₄-Z₁, Z₁-Z₂-Z₃-X₁-X₂-Y₁-Y₂-Z₁, Z₁-Z₂-Z₃-X₁-X₂-X₃-Y₁-Y₂-Z₁, Z₁-Z₂-Z₃-X₁-X₂-X₃-X₄-Y₁-Y₂-Z₁, Z₁-Z₂-Z₃-X₁-X₂-Y₁-Y₂-Y₃-Z₁, Z₁-Z₂-Z₃-X₁-X₂-X₃-Y₁-Y₂-Y₃-Z₁, Z₁-Z₂-Z₃-X₁-X₂-X₃-X₄-Y₁-Y₂-Y₃-Z₁, Z₁-Z₂-Z₃-X₁-X₂-Y₁-Y₂-Y₃-Y₄-Z₁, Z₁-Z₂-Z₃-X₁-X₂-X₃-Y₁-Y₂-Y₃-Y₄-Z₁, Z₁-Z₂-Z₃-X₁-X₂-X₃-X₄-Y₁-Y₂-Y₃-Y₄-Z₁, Z₁-Z₂-Z₃-Z₄-X₁-X₂-Y₁-Y₂-Z₁, Z₁-Z₂-Z₃-Z₄-X₁-X₂-X₃-Y₁-Y₂-Z₁, Z₁-Z₂-Z₃-Z₄-X₁-X₂-X₃-X₄—Y₁-Y₂-Z₁, Z₁-Z₂-Z₃-Z₄-X₁-X₂-Y₁-Y₂-Y₃-Z₁, Z₁-Z₂-Z₃-Z₄-X₁-X₂-X₃-Y₁-Y₂-Y₃-Z₁, Z₁-Z₂-Z₃-Z₄-X₁-X₂-X₃-X₄-Y₁-Y₂-Y₃-Z₁, Z₁-Z₂-Z₃-Z₄-X₁-X₂-Y₁-Y₂-Y₃-Y₄-Z₁, Z₁-Z₂-Z₃-Z₄-X₁-X₂-X₃-Y₁-Y₂-Y₃-Y₄-Z₁, Z₁-Z₂-Z₃-Z₄-X₁-X₂-X₃-X₄-Y₁-Y₂-Y₃-Y₄-Z₁, X₁-X₂-Y₁-Y₂-Z₁-Z₂, X₁-X₂-X₃-Y₁-Y₂-Z₁-Z₂, X₁-X₂-X₃-X₄-Y₁-Y₂-Z₁-Z₂, X₁-X₂-Y₁-Y₂-Y₃-Z₁-Z₂, X₁-X₂-X₃-Y₁-Y₂-Y₃-Z₁-Z₂, X₁-X₂-X₃-X₄-Y₁-Y₂-Y₃-Z₁-Z₂, X₁-X₂-Y₁-Y₂-Y₃-Y₄-Z₁-Z₂, X₁-X₂-X₃-Y₁-Y₂-Y₃-Y₄-Z₁-Z₂, X₁-X₂-X₃-X₄-Y₁-Y₂-Y₃-Y₄-Z₁-Z₂, Z₁-X₁-X₂-Y₁-Y₂-Z₁-Z₂, Z₁-X₁-X₂-X₃-Y₁-Y₂-Z₁-Z₂, Z₁-X₁-X₂-X₃-X₄-Y₁-Y₂-Z₁-Z₂, Z₁-X₁-X₂-Y₁-Y₂-Y₃-Z₁-Z₂, Z₁-X₁-X₂-X₃-Y₁-Y₂-Y₃-Z₁-Z₂, Z₁-X₁-X₂-X₃-X₄-Y₁-Y₂-Y₃-Z₁-Z₂, Z₁-X₁-X₂-Y₁-Y₂-Y₃-Y₄-Z₁-Z₂, Z₁-X₁-X₂-X₃-Y₁-Y₂-Y₃-Y₄-Z₁-Z₂, Z₁-X₁-X₂-X₃-X₄-Y₁-Y₂-Y₃-Y₄-Z₁-Z₂, Z₁-Z₂-X₁-X₂-Y₁-Y₂-Z₁-Z₂, Z₁-Z₂-X₁-X₂-X₃-Y₁-Y₂-Z₁-Z₂, Z₁-Z₂-X₁-X₂-X₃-X₄-Y₁-Y₂-Z₁-Z₂, Z₁-Z₂-X₁-X₂-Y₁-Y₂-Y₃-Z₁-Z₂, Z₁-Z₂-X₁-X₂-X₃-Y₁-Y₂-Y₃-Z₁-Z₂, Z₁-Z₂-X₁-X₂-X₃-X₄-Y₂-Y₃-Z₁-Z₂, Z₁-Z₂-X₁-X₂-Y₁-Y₂-Y₃-Y₄-Z₁-Z₂, Z₁-Z₂-X₁-X₂-X₃-Y₁-Y₂-Y₃-Y₄-Z₁-Z₂, Z₁-Z₂-X₁-X₂-X₃-X₄—Y₁-Y₂-Y₃-Y₄-Z₁-Z₂, Z₁-Z₂-Z₃-X₁-X₂-Y₁-Y₂-Z₁-Z₂, Z₁-Z₂-Z₃-X₁-X₂-X₃-Y₁-Y₂-Z₁-Z₂, Z₁-Z₂-Z₃-X₁-X₂-X₃-X₄-Y₁-Y₂-Z₁-Z₂, Z₁-Z₂-Z₃-X₁-X₂-Y₁-Y₂-Y₃-Z₁-Z₂, Z₁-Z₂-Z₃-X₁-X₂-X₃-Y₁-Y₂-Y₃-Z₁-Z₂, Z₁-Z₂-Z₃-X₁-X₂-X₃-X₄-Y₁-Y₂-Y₃-Z₁-Z₂, Z₁-Z₂-Z₃-X₁-X₂-Y₁-Y₂-Y₃-Y₄-Z₁-Z₂, Z₁-Z₂-Z₃-X₁-X₂-X₃-Y₁-Y₂-Y₃-Y₄-Z₁-Z₂, Z₁-Z₂-Z₃-X₁-X₂-X₃-X₄-Y₁-Y₂-Y₃-Y₄-Z₁-Z₂, Z₁-Z₂-Z₃-Z₄-X₁-X₂-Y₁-Y₂-Z₁-Z₂, Z₁-Z₂-Z₃-Z₄-X₁-X₂-X₃-Y₁-Y₂-Z₁-Z₂, Z₁-Z₂-Z₃-Z₄-X₁-X₂-X₃-X₄-Y₁-Y₂-Z₁-Z₂, Z₁-Z₂-Z₃-Z₄-X₁-X₂-Y₁-Y₂-Y₃-Z₁-Z₂, Z₁-Z₂-Z₃-Z₄-X₁-X₂-X₃-Y₁-Y₂-Y₃-Z₁-Z₂, Z₁-Z₂-Z₃-Z₄-X₁-X₂-X₃-X₄-Y₁-Y₂-Y₃-Z₁-Z₂, Z₁-Z₂-Z₃-Z₄-X₁-X₂-Y₁-Y₂-Y₃-Y₄-Z₁-Z₂, Z₁-Z₂-Z₃-Z₄-X₁-X₂-X₃-Y₁-Y₂-Y₃-Y₄-Z₁-Z₂, Z₁-Z₂-Z₃-Z₄-X₁-X₂-X₃-X₄-Y₁-Y₂-Y₃-Y₄-Z₁-Z₂, X₁-X₂-Y₁-Y₂-Z₁-Z₂-Z₃, X₁-X₂-X₃-Y₁-Y₂-Z₁-Z₂-Z₃, X₁-X₂-X₃-X₄-Y₁-Y₂-Z₁-Z₂-Z₃, X₁-X₂-Y₁-Y₂-Y₃-Z₁-Z₂-Z₃, X₁-X₂-X₃-Y₁-Y₂-Y₃-Z₁-Z₂-Z₃, X₁-X₂-X₃-X₄-Y₁-Y₂-Y₃-Z₁-Z₂-Z₃, X₁-X₂-Y₁-Y₂-Y₃-Y₄-Z₁-Z₂-Z₃, X₁-X₂-X₃-Y₁-Y₂-Y₃-Y₄-Z₁-Z₂-Z₃, X₁-X₂-X₃-X₄-Y₁-Y₂-Y₃-Y₄-Z₁-Z₂-Z₃, Z₁-X₁-X₂-Y₁-Y₂-Z₁-Z₂-Z₃, Z₁-X₁-X₂-X₃-Y₁-Y₂-Z₁-Z₂-Z₃, Z₁-X₁-X₂-X₃-X₄-Y₁-Y₂-Z₁-Z₂-Z₃, Z₁-X₁-X₂-Y₁-Y₂-Y₃-Z₁-Z₂-Z₃, Z₁-X₁-X₂-X₃-Y₁-Y₂-Y₃-Z₁-Z₂-Z₃, Z₁-X₁-X₂-X₃-X₄-Y₁-Y₂-Y₃-Z₁-Z₂-Z₃, Z₁-X₁-X₂-Y₁-Y₂-Y₃-Y₄-Z₁-Z₂-Z₃, Z₁-X₁-X₂-X₃-Y₁-Y₂-Y₃-Y₄-Z₁-Z₂-Z₃, Z₁-X₁-X₂-X₃-X₄-Y₁-Y₂-Y₃-Y₄-Z₁-Z₂-Z₃, Z₁-Z₂-X₁-X₂-Y₁-Y₂-Z₁-Z₂-Z₃, Z₁-Z₂-X₁-X₂-X₃-Y₁-Y₂-Z₁-Z₂-Z₃, Z₁-Z₂-X₁-X₂-X₃-X₄-Y₁-Y₂-Z₁-Z₂-Z₃, Z₁-Z₂-X₁-X₂-Y₁-Y₂-Y₃-Z₁-Z₂-Z₃, Z₁-Z₂-X₁-X₂-X₃-Y₁-Y₂-Y₃-Z₁-Z₂-Z₃, Z₁-Z₂-X₁-X₂-X₃-X₄-Y₁-Y₂-Y₃-Z₁-Z₂-Z₃, Z₁-Z₂-X₁-X₂-Y₁-Y₂-Y₃-Y₄-Z₁-Z₂-Z₃, Z₁-Z₂-X₁-X₂-X₃-Y₁-Y₂-Y₃-Y₄-Z₁-Z₂-Z₃, Z₁-Z₂-X₁-X₂-X₃-X₄-Y₁-Y₂-Y₃-Y₄—Z₁-Z₂-Z₃, Z₁-Z₂-Z₃-X₁-X₂-Y₁-Y₂-Z₁-Z₂-Z₃, Z₁-Z₂-Z₃-X₁-X₂-X₃-Y₁-Y₂-Z₁-Z₂-Z₃, Z₁-Z₂-Z₃-X₁-X₂-X₃-X₄-Y₁-Y₂-Z₁-Z₂-Z₃, Z₁-Z₂-Z₃-X₁-X₂-Y₁-Y₂-Y₃-Z₁-Z₂-Z₃, Z₁-Z₂-Z₃-X₁-X₂-X₃-Y₁-Y₂-Y₃-Z₁-Z₂-Z₃, Z₁-Z₂-Z₃-X₁-X₂-X₃-X₄-Y₁-Y₂-Y₃-Z₁-Z₂-Z₃, Z₁-Z₂-Z₃-X₁-X₂-Y₁-Y₂-Y₃-Y₄-Z₁-Z₂-Z₃, Z₁-Z₂-Z₃-X₁-X₂-X₃-Y₁-Y₂-Y₃-Y₄-Z₁-Z₂-Z₃, Z₁-Z₂-Z₃-X₁-X₂-X₃-X₄-Y₁-Y₂-Y₃-Y₄-Z₁-Z₂-Z₃, Z₁-Z₂-Z₃-Z₄-X₁-X₂-Y₁-Y₂-Z₁-Z₂-Z₃, Z₁-Z₂-Z₃-Z₄-X₁-X₂-X₃-Y₁-Y₂-Z₁-Z₂-Z₃, Z₁-Z₂-Z₃-Z₄-X₁-X₂-X₃-X₄-Y₁-Y₂-Z₁-Z₂-Z₃, Z₁-Z₂-Z₃-Z₄-X₁-X₂-Y₁-Y₂-Y₃-Z₁-Z₂-Z₃, Z₁-Z₂-Z₃-Z₄-X₁-X₂-X₃-Y₁-Y₂-Y₃-Z₁-Z₂-Z₃, Z₁-Z₂-Z₃-Z₄-X₁-X₂-X₃-X₄-Y₁-Y₂-Y₃-Z₁-Z₂-Z₃, Z₁-Z₂-Z₃-Z₄-X₁-X₂-Y₁-Y₂-Y₃-Y₄-Z₁-Z₂-Z₃, Z₁-Z₂-Z₃-Z₄-X₁-X₂-X₃-Y₁-Y₂-Y₃-Y₄-Z₁-Z₂-Z₃, Z₁-Z₂-Z₃-Z₄-X₁-X₂-X₃-X₄-Y₁-Y₂-Y₃-Y₄-Z₁-Z₂-Z₃, X₁-X₂-Y₁-Y₂-Z₁-Z₂-Z₃-Z₄, X₁-X₂-X₃-Y₁-Y₂-Z₁-Z₂-Z₃-Z₄, X₁-X₂-X₃-X₄-Y₁-Y₂-Z₁-Z₂-Z₃-Z₄, X₁-X₂-Y₁-Y₂-Y₃-Z₁-Z₂-Z₃-Z₄, X₁-X₂-X₃-Y₁-Y₂-Y₃-Z₁-Z₂-Z₃-Z₄, X₁-X₂-X₃-X₄-Y₁-Y₂-Y₃-Z₁-Z₂-Z₃-Z₄, X₁-X₂-Y₁-Y₂-Y₃-Y₄-Z₁-Z₂-Z₃-Z₄, X₁-X₂-X₃-Y₁-Y₂-Y₃-Y₄-Z₁-Z₂-Z₃-Z₄, X₁-X₂-X₃-X₄-Y₁-Y₂-Y₃-Y₄—Z₁-Z₂-Z₃-Z₄, Z₁-X₁-X₂-Y₁-Y₂-Z₁-Z₂-Z₃-Z₄, Z₁-X₁-X₂-X₃-Y₁-Y₂-Z₁-Z₂-Z₃-Z₄, Z₁-X₁-X₂-X₃-X₄-Y₁-Y₂-Z₁-Z₂-Z₃-Z₄, Z₁-X₁-X₂-Y₁-Y₂-Y₃-Z₁-Z₂-Z₃-Z₄, Z₁-X₁-X₂-X₃-Y₁-Y₂-Y₃-Z₁-Z₂-Z₃-Z₄, Z₁-X₁-X₂-X₃-X₄-Y₁-Y₂-Y₃-Z₁-Z₂-Z₃-Z₄, Z₁-X₁-X₂-Y₁-Y₂-Y₃-Y₄-Z₁-Z₂-Z₃-Z₄, Z₁-X₁-X₂-X₃-Y₁-Y₂-Y₃-Y₄-Z₁-Z₂-Z₃-Z₄, Z₁-X₁-X₂-X₃-X₄-Y₁-Y₂-Y₃-Y₄-Z₁-Z₂-Z₃-Z₄, Z₁-Z₂-X₁-X₂-Y₁-Y₂-Z₁-Z₂-Z₃-Z₄, Z₁-Z₂-X₁-X₂-X₃-Y₁-Y₂-Z₁-Z₂-Z₃-Z₄, Z₁-Z₂-X₁-X₂-X₃-X₄-Y₁-Y₂-Z₁-Z₂-Z₃-Z₄, Z₁-Z₂-X₁-X₂-Y₁-Y₂-Y₃-Z₁-Z₂-Z₃-Z₄, Z₁-Z₂-X₁-X₂-X₃-Y₁-Y₂-Y₃-Z₁-Z₂-Z₃-Z₄, Z₁-Z₂-X₁-X₂-X₃-X₄-Y₁-Y₂-Y₃-Z₁-Z₂-Z₃-Z₄, Z₁-Z₂-X₁-X₂-Y₁-Y₂-Y₃-Y₄-Z₁-Z₂-Z₃-Z₄, Z₁-Z₂-X₁-X₂-X₃-Y₁-Y₂-Y₃-Y₄-Z₁-Z₂-Z₃-Z₄, Z₁-Z₂-X₁-X₂-X₃-X₄-Y₁-Y₂-Y₃-Y₄-Z₁-Z₂-Z₃-Z₄, Z₁-Z₂-Z₃-X₁-X₂-Y₁-Y₂-Z₁-Z₂-Z₃-Z₄, Z₁-Z₂-Z₃-X₁-X₂-X₃-Y₁-Y₂-Z₁-Z₂-Z₃-Z₄, Z₁-Z₂-Z₃-X₁-X₂-X₃-X₄-Y₁-Y₂-Z₁-Z₂-Z₃-Z₄, Z₁-Z₂-Z₃-X₁-X₂-Y₁-Y₂-Y₃-Z₁-Z₂-Z₃-Z₄, Z₁-Z₂-Z₃-X₁-X₂-X₃-Y₁-Y₂-Y₃-Z₁-Z₂-Z₃-Z₄, Z₁-Z₂-Z₃-X₁-X₂-X₃-X₄-Y₁-Y₂-Y₃-Z₁-Z₂-Z₃-Z₄, Z₁-Z₂-Z₃-X₁-X₂-Y₁-Y₂-Y₃-Y₄-Z₁-Z₂-Z₃-Z₄, Z₁-Z₂-Z₃-X₁-X₂-X₃-Y₁-Y₂-Y₃-Y₄-Z₁-Z₂-Z₃-Z₄, Z₁-Z₂-Z₃-X₁-X₂-X₃-X₄-Y₁-Y₂-Y₃-Y₄-Z₁-Z₂-Z₃-Z₄, Z₁-Z₂-Z₃-Z₄-X₁-X₂-Y₁-Y₂-Z₁-Z₂-Z₃-Z₄, Z₁-Z₂-Z₃-Z₄-X₁-X₂-X₃-Y₁-Y₂-Z₁-Z₂-Z₃-Z₄, Z₁-Z₂-Z₃-Z₄-X₁-X₂-X₃-X₄-Y₁-Y₂-Z₁-Z₂-Z₃-Z₄, Z₁-Z₂-Z₃-Z₄-X₁-X₂-Y₁-Y₂-Y₃-Z₁-Z₂-Z₃-Z₄, Z₁-Z₂-Z₃-Z₄-X₁-X₂-X₃-Y₁-Y₂-Y₃-Z₁-Z₂-Z₃-Z₄, Z₁-Z₂-Z₃-Z₄-X₁-X₂-X₃-X₄-Y₁-Y₂-Y₃-Z₁-Z₂-Z₃-Z₄, Z₁-Z₂-Z₃-Z₄-X₁-X₂-Y₁-Y₂-Y₃-Y₄-Z₁-Z₂-Z₃-Z₄, Z₁-Z₂-Z₃-Z₄-X₁-X₂-X₃-Y₁-Y₂-Y₃-Y₄-Z₁-Z₂-Z₃-Z₄, Z₁-Z₂-Z₃-Z₄-X₁-X₂-X₃-X₄-Y₁-Y₂-Y₃-Y₄-Z₁-Z₂-Z₃-Z₄, Z₁-Y₁-Y₂-X₁-X₂, Z₁-Y₁-Y₂-X₁-X₂-X₃, Z₁-Y₁-Y₂-X₁-X₂-X₃-X₄, Z₁-Y₁-Y₂-Y₃-X₁-X₂, Z₁-Y₁-Y₂-Y₃-X₁-X₂-X₃, Z₁-Y₁-Y₂-Y₃-X₁-X₂-X₃-X₄, Z₁-Y₁-Y₂-Y₃-Y₄-X₁-X₂, Z₁-Y₁-Y₂-Y₃-Y₄-X₁-X₂-X₃, Z₁-Y₁-Y₂-Y₃-Y₄-X₁-X₂-X₃-X₄, Z₁-Z₂-Y₁-Y₂-X₁-X₂, Z₁-Z₂-Y₁-Y₂-X₁-X₂-X₃, Z₁-Z₂-Y₁-Y₂-X₁-X₂-X₃-X₄, Z₁-Z₂-Y₁-Y₂-Y₃-X₁-X₂, Z₁-Z₂-Y₁-Y₂-Y₃-X₁-X₂-X₃, Z₁-Z₂-Y₁-Y₂-Y₃-X₁-X₂-X₃-X₄, Z₁-Z₂-Y₁-Y₂-Y₃-Y₄-X₁-X₂, Z₁-Z₂-Y₁-Y₂-Y₃-Y₄-X₁-X₂-X₃, Z₁-Z₂-Y₁-Y₂-Y₃-Y₄-X₁-X₂-X₃-X₄, Z₁-Z₂-Z₃-Y₁-Y₂-X₁-X₂, Z₁-Z₂-Z₃-Y₁-Y₂-X₁-X₂-X₃, Z₁-Z₂-Z₃-Y₁-Y₂-X₁-X₂-X₃-X₄, Z₁-Z₂-Z₃-Y₁-Y₂-Y₃-X₁-X₂, Z₁-Z₂-Z₃-Y₁-Y₂-Y₃-X₁-X₂-X₃, Z₁-Z₂-Z₃-Y₁-Y₂-Y₃-X₁-X₂-X₃-X₄, Z₁-Z₂-Z₃-Y₁-Y₂-Y₃-Y₄-X₁-X₂, Z₁-Z₂-Z₃-Y₁-Y₂-Y₃-Y₄-X₁-X₂-X₃, Z₁-Z₂-Z₃-Y₁-Y₂-Y₃-Y₄-X₁-X₂-X₃-X₄, Z₁-Z₂-Z₃-Z₄-Y₁-Y₂-X₁-X₂, Z₁-Z₂-Z₃-Z₄-Y₁-Y₂-X₁-X₂-X₃, Z₁-Z₂-Z₃-Z₄-Y₁-Y₂-X₁-X₂-X₃-X₄, Z₁-Z₂-Z₃-Z₄-Y₁-Y₂-Y₃-X₁-X₂, Z₁-Z₂-Z₃-Z₄-Y₁-Y₂-Y₃-X₁-X₂-X₃, Z₁-Z₂-Z₃-Z₄-Y₁-Y₂-Y₃-X₁-X₂-X₃-X₄, Z₁-Z₂-Z₃-Z₄-Y₁-Y₂-Y₃-Y₄-X₁-X₂, Z₁-Z₂-Z₃-Z₄-Y₁-Y₂-Y₃-Y₄-X₁-X₂-X₃, Z₁-Z₂-Z₃-Z₄-Y₁-Y₂-Y₃-Y₄-X₁-X₂-X₃-X₄, Y₁-Y₂-X₁-X₂-Z₁, Y₁-Y₂-X₁-X₂-X₃-Z₁, Y₁-Y₂-X₁-X₂-X₃-X₄-Z₁, Y₁-Y₂-Y₃-X₁-X₂-Z₁, Y₁-Y₂-Y₃-X₁-X₂-X₃-Z₁, Y₁-Y₂-Y₃-X₁-X₂-X₃-X₄-Z₁, Y₁-Y₂-Y₃-Y₄-X₁-X₂-Z₁, Y₁-Y₂-Y₃-Y₄-X₁-X₂-X₃-Z₁, Y₁-Y₂-Y₃-Y₄-X₁-X₂-X₃-X₄-Z₁, Z₁-Y₁-Y₂-X₁-X₂-Z₁, Z₁-Y₁-Y₂-X₁-X₂-X₃-Z₁, Z₁-Y₁-Y₂-X₁-X₂-X₃-X₄-Z₁, Z₁-Y₁-Y₂-Y₃-X₁-X₂-Z₁, Z₁-Y₁-Y₂-Y₃-X₁-X₂-X₃-Z₁, Z₁-Y₁-Y₂-Y₃-X₁-X₂-X₃-X₄-Z₁, Z₁-Y₁-Y₂-Y₃-Y₄-X₁-X₂-Z₁, Z₁-Y₁-Y₂-Y₃-Y₄-X₁-X₂-X₃-Z₁, Z₁-Y₁-Y₂-Y₃-Y₄-X₁-X₂-X₃-X₄-Z₁, Z₁-Z₂-Y₁-Y₂-X₁-X₂-Z₁, Z₁-Z₂-Y₁-Y₂-X₁-X₂-X₃-Z₁, Z₁-Z₂-Y₁-Y₂-X₁-X₂-X₃-X₄-Z₁, Z₁-Z₂-Y₁-Y₂-Y₃-X₁-X₂-Z₁, Z₁-Z₂-Y₁-Y₂-Y₃-X₁-X₂-X₃-Z₁, Z₁-Z₂-Y₁-Y₂-Y₃-X₁-X₂-X₃-X₄-Z₁, Z₁-Z₂-Y₁-Y₂-Y₃-Y₄-X₁-X₂-Z₁, Z₁-Z₂-Y₁-Y₂-Y₃-Y₄-X₁-X₂-X₃-Z₁, Z₁-Z₂-Y₁-Y₂-Y₃-Y₄-X₁-X₂-X₃-X₄-Z₁, Z₁-Z₂-Z₃-Y₁-Y₂-X₁-X₂-Z₁, Z₁-Z₂-Z₃-Y₁-Y₂-X₁-X₂-X₃-Z₁, Z₁-Z₂-Z₃-Y₁-Y₂-X₁-X₂-X₃-X₄-Z₁, Z₁-Z₂-Z₃-Y₁-Y₂-Y₃-X₁-X₂-Z₁, Z₁-Z₂-Z₃-Y₁-Y₂-Y₃-X₁-X₂-X₃-Z₁, Z₁-Z₂-Z₃-Y₁-Y₂-Y₃-X₁-X₂-X₃-X₄-Z₁, Z₁-Z₂-Z₃-Y₁-Y₂-Y₃-Y₄-X₁-X₂-Z₁, Z₁-Z₂-Z₃-Y₁-Y₂-Y₃-Y₄-X₁-X₂-X₃-Z₁, Z₁-Z₂-Z₃-Y₁-Y₂-Y₃-Y₄-X₁-X₂-X₃-X₄-Z₁, Z₁-Z₂-Z₃-Z₄-Y₁-Y₂-X₁-X₂-Z₁, Z₁-Z₂-Z₃-Z₄-Y₁-Y₂-X₁-X₂-X₃-Z₁, Z₁-Z₂-Z₃-Z₄-Y₁-Y₂-X₁-X₂-X₃-X₄-Z₁, Z₁-Z₂-Z₃-Z₄-Y₁-Y₂-Y₃-X₁-X₂-Z₁, Z₁-Z₂-Z₃-Z₄-Y₁-Y₂-Y₃-X₁-X₂-X₃-Z₁, Z₁-Z₂-Z₃-Z₄-Y₁-Y₂-Y₃-X₁-X₂-X₃-X₄-Z₁, Z₁-Z₂-Z₃-Z₄-Y₁-Y₂-Y₃-Y₄-X₁-X₂-Z₁, Z₁-Z₂-Z₃-Z₄-Y₁-Y₂-Y₃-Y₄-X₁-X₂-X₃-Z₁, Z₁-Z₂-Z₃-Z₄-Y₁-Y₂-Y₃-Y₄-X₁-X₂-X₃-X₄-Z₁, Y₁-Y₂-X₁-X₂-Z₁-Z₂, Y₁-Y₂-X₁-X₂-X₃-Z₁-Z₂, Y₁-Y₂-X₁-X₂-X₃-X₄-Z₁-Z₂, Y₁-Y₂-Y₃-X₁-X₂-Z₁-Z₂, Y₁-Y₂-Y₃-X₁-X₂-X₃-Z₁-Z₂, Y₁-Y₂-Y₃-X₁-X₂-X₃-X₄-Z₁-Z₂, Y₁-Y₂-Y₃-Y₄-X₁-X₂-Z₁-Z₂, Y₁-Y₂-Y₃-Y₄-X₁-X₂-X₃-Z₁-Z₂, Y₁-Y₂-Y₃-Y₄-X₁-X₂-X₃-X₄-Z₁-Z₂, Z₁-Y₁-Y₂-X₁-X₂-Z₁-Z₂, Z₁-Y₁-Y₂-X₁-X₂-X₃-Z₁-Z₂, Z₁-Y₁-Y₂-X₁-X₂-X₃-X₄-Z₁-Z₂, Z₁-Y₁-Y₂-Y₃-X₁-X₂-Z₁-Z₂, Z₁-Y₁-Y₂-Y₃-X₁-X₂-X₃-Z₁-Z₂, Z₁-Y₁-Y₂-Y₃-X₁-X₂-X₃-X₄-Z₁-Z₂, Z₁-Y₁-Y₂-Y₃-Y₄-X₁-X₂-Z₁-Z₂, Z₁-Y₁-Y₂-Y₃-Y₄-X₁-X₂-X₃-Z₁-Z₂, Z₁-Y₁-Y₂-Y₃-Y₄-X₁-X₂-X₃-X₄-Z₁-Z₂, Z₁-Z₂-Y₁-Y₂-X₁-X₂-Z₁-Z₂, Z₁-Z₂-Y₁-Y₂-X₁-X₂-X₃-Z₁-Z₂, Z₁-Z₂-Y₁-Y₂-X₁-X₂-X₃-X₄-Z₁-Z₂, Z₁-Z₂-Y₁-Y₂-Y₃-X₁-X₂-Z₁-Z₂, Z₁-Z₂-Y₁-Y₂-Y₃-X₁-X₂-X₃-Z₁-Z₂, Z₁-Z₂-Y₁-Y₂-Y₃-X₁-X₂-X₃-X₄-Z₁-Z₂, Z₁-Z₂-Y₁-Y₂-Y₃-Y₄-X₁-X₂-Z₁-Z₂, Z₁-Z₂-Y₁-Y₂-Y₃-Y₄-X₁-X₂-X₃-Z₁-Z₂, Z₁-Z₂-Y₁-Y₂-Y₃-Y₄-X₁-X₂-X₃-X₄-Z₁-Z₂, Z₁-Z₂-Z₃-Y₁-Y₂-X₁-X₂-Z₁-Z₂, Z₁-Z₂-Z₃-Y₁-Y₂-X₁-X₂-X₃-Z₁-Z₂, Z₁-Z₂-Z₃-Y₁-Y₂-X₁-X₂-X₃-X₄-Z₁-Z₂, Z₁-Z₂-Z₃-Y₁-Y₂-Y₃-X₁-X₂-Z₁-Z₂, Z₁-Z₂-Z₃-Y₁-Y₂-Y₃-X₁-X₂-X₃-Z₁-Z₂, Z₁-Z₂-Z₃-Y₁-Y₂-Y₃-X₁-X₂-X₃-X₄-Z₁-Z₂, Z₁-Z₂-Z₃-Y₁-Y₂-Y₃-Y₄-X₁-X₂-Z₁-Z₂, Z₁-Z₂-Z₃-Y₁-Y₂-Y₃-Y₄-X₁-X₂-X₃-Z₁-Z₂, Z₁-Z₂-Z₃-Y₁-Y₂-Y₃-Y₄-X₁-X₂-X₃-X₄-Z₁-Z₂, Z₁-Z₂-Z₃-Z₄-Y₁-Y₂-X₁-X₂-Z₁-Z₂, Z₁-Z₂-Z₃-Z₄-Y₁-Y₂-X₁-X₂-X₃-Z₁-Z₂, Z₁-Z₂-Z₃-Z₄-Y₁-Y₂-X₁-X₂-X₃-X₄-Z₁-Z₂, Z₁-Z₂-Z₃-Z₄-Y₁-Y₂-Y₃-X₁-X₂-Z₁-Z₂, Z₁-Z₂-Z₃-Z₄-Y₁-Y₂-Y₃-X₁-X₂-X₃-Z₁-Z₂, Z₁-Z₂-Z₃-Z₄-Y₁-Y₂-Y₃-X₁-X₂-X₃-X₄-Z₁-Z₂, Z₁-Z₂-Z₃-Z₄-Y₁-Y₂-Y₃-Y₄-X₁-X₂-Z₁-Z₂, Z₁-Z₂-Z₃-Z₄-Y₁-Y₂-Y₃-Y₄-X₁-X₂-X₃-Z₁-Z₂, Z₁-Z₂-Z₃-Z₄-Y₁-Y₂-Y₃-Y₄-X₁-X₂-X₃-X₄-Z₁-Z₂, Y₁-Y₂-X₁-X₂-Z₁-Z₂-Z₃, Y₁-Y₂-X₁-X₂-X₃-Z₁-Z₂-Z₃, Y₁-Y₂-X₁-X₂-X₃-X₄-Z₁-Z₂-Z₃, Y₁-Y₂-Y₃-X₁-X₂-Z₁-Z₂-Z₃, Y₁-Y₂-Y₃-X₁-X₂-X₃-Z₁-Z₂-Z₃, Y₁-Y₂-Y₃-X₁-X₂-X₃-X₄-Z₁-Z₂-Z₃, Y₁-Y₂-Y₃-Y₄-X₁-X₂-Z₁-Z₂-Z₃, Y₁-Y₂-Y₃-Y₄-X₁-X₂-X₃-Z₁-Z₂-Z₃, Y₁-Y₂-Y₃-Y₄-X₁-X₂-X₃-X₄-Z₁-Z₂-Z₃, Z₁-Y₁-Y₂-X₁-X₂-Z₁-Z₂-Z₃, Z₁-Y₁-Y₂-X₁-X₂-X₃-Z₁-Z₂-Z₃, Z₁-Y₁-Y₂-X₁-X₂-X₃-X₄-Z₁-Z₂-Z₃, Z₁-Y₁-Y₂-Y₃-X₁-X₂-Z₁-Z₂-Z₃, Z₁-Y₁-Y₂-Y₃-X₁-X₂-X₃-Z₁-Z₂-Z₃, Z₁-Y₁-Y₂-Y₃-X₁-X₂-X₃-X₄-Z₁-Z₂-Z₃, Z₁-Y₁-Y₂-Y₃-Y₄-X₁-X₂-Z₁-Z₂-Z₃, Z₁-Y₁-Y₂-Y₃-Y₄-X₁-X₂-X₃-Z₁-Z₂-Z₃, Z₁-Y₁-Y₂-Y₃-Y₄-X₁-X₂-X₃-X₄-Z₁-Z₂-Z₃, Z₁-Z₂-Y₁-Y₂-X₁-X₂-Z₁-Z₂-Z₃, Z₁-Z₂-Y₁-Y₂-X₁-X₂-X₃-Z₁-Z₂-Z₃, Z₁-Z₂-Y₁-Y₂-X₁-X₂-X₃-X₄-Z₁-Z₂-Z₃, Z₁-Z₂-Y₁-Y₂-Y₃-X₁-X₂-Z₁-Z₂-Z₃, Z₁-Z₂-Y₁-Y₂-Y₃-X₁-X₂-X₃-Z₁-Z₂-Z₃, Z₁-Z₂-Y₁-Y₂-Y₃-X₁-X₂-X₃-X₄-Z₁-Z₂-Z₃, Z₁-Z₂-Y₁-Y₂-Y₃-Y₄-X₁-X₂-Z₁-Z₂-Z₃, Z₁-Z₂-Y₁-Y₂-Y₃-Y₄-X₁-X₂-X₃-Z₁-Z₂-Z₃, Z₁-Z₂-Y₁-Y₂-Y₃-Y₄-X₁-X₂-X₃-X₄-Z₁-Z₂-Z₃, Z₁-Z₂-Z₃-Y₁-Y₂-X₁-X₂-Z₁-Z₂-Z₃, Z₁-Z₂-Z₃-Y₁-Y₂-X₁-X₂-X₃-Z₁-Z₂-Z₃, Z₁-Z₂-Z₃-Y₁-Y₂-X₁-X₂-X₃-X₄-Z₁-Z₂-Z₃, Z₁-Z₂-Z₃-Y₁-Y₂-Y₃-X₁-X₂-Z₁-Z₂-Z₃, Z₁-Z₂-Z₃-Y₁-Y₂-Y₃-X₁-X₂-X₃-Z₁-Z₂-Z₃, Z₁-Z₂-Z₃-Y₁-Y₂-Y₃-X₁-X₂-X₃-X₄-Z₁-Z₂-Z₃, Z₁-Z₂-Z₃-Y₁-Y₂-Y₃-Y₄-X₁-X₂-Z₁-Z₂-Z₃, Z₁-Z₂-Z₃-Y₁-Y₂-Y₃-Y₄-X₁-X₂-X₃-Z₁-Z₂-Z₃, Z₁-Z₂-Z₃-Y₁-Y₂-Y₃-Y₄-X₁-X₂-X₃-X₄-Z₁-Z₂-Z₃, Z₁-Z₂-Z₃-Z₄-Y₁-Y₂-X₁-X₂-Z₁-Z₂-Z₃, Z₁-Z₂-Z₃-Z₄-Y₁-Y₂-X₁-X₂-X₃-Z₁-Z₂-Z₃, Z₁-Z₂-Z₃-Z₄-Y₁-Y₂-X₁-X₂-X₃-X₄-Z₁-Z₂-Z₃, Z₁-Z₂-Z₃-Z₄-Y₁-Y₂-Y₃-X₁-X₂-Z₁-Z₂-Z₃, Z₁-Z₂-Z₃-Z₄-Y₁-Y₂-Y₃-X₁-X₂-X₃-Z₁-Z₂-Z₃, Z₁-Z₂-Z₃-Z₄-Y₁-Y₂-Y₃-X₁-X₂-X₃-X₄-Z₁-Z₂-Z₃, Z₁-Z₂-Z₃-Z₄-Y₁-Y₂-Y₃-Y₄-X₁-X₂-Z₁-Z₂-Z₃, Z₁-Z₂-Z₃-Z₄-Y₁-Y₂-Y₃-Y₄-X₁-X₂-X₃-Z₁-Z₂-Z₃, Z₁-Z₂-Z₃-Z₄-Y₁-Y₂-Y₃-Y₄-X₁-X₂-X₃-X₄-Z₁-Z₂-Z₃, Y₁-Y₂-X₁-X₂-Z₁-Z₂-Z₃-Z₄, Y₁-Y₂-X₁-X₂-X₃-Z₁-Z₂-Z₃-Z₄, Y₁-Y₂-X₁-X₂-X₃-X₄-Z₁-Z₂-Z₃-Z₄, Y₁-Y₂-Y₃-X₁-X₂-Z₁-Z₂-Z₃-Z₄, Y₁-Y₂-Y₃-X₁-X₂-X₃-Z₁-Z₂-Z₃-Z₄, Y₁-Y₂-Y₃-X₁-X₂-X₃-X₄-Z₁-Z₂-Z₃-Z₄, Y₁-Y₂-Y₃-Y₄-X₁-X₂-Z₁-Z₂-Z₃-Z₄, Y₁-Y₂-Y₃-Y₄-X₁-X₂-X₃-Z₁-Z₂-Z₃-Z₄, Y₁-Y₂-Y₃-Y₄-X₁-X₂-X₃-X₄-Z₁-Z₂-Z₃-Z₄, Z₁-Y₁-Y₂-X₁-X₂-Z₁-Z₂-Z₃-Z₄, Z₁-Y₁-Y₂-X₁-X₂-X₃-Z₁-Z₂-Z₃-Z₄, Z₁-Y₁-Y₂-X₁-X₂-X₃-X₄-Z₁-Z₂-Z₃-Z₄, Z₁-Y₁-Y₂-Y₃-X₁-X₂-Z₁-Z₂-Z₃-Z₄, Z₁-Y₁-Y₂-Y₃-X₁-X₂-X₃-Z₁-Z₂-Z₃-Z₄, Z₁-Y₁-Y₂-Y₃-X₁-X₂-X₃-X₄-Z₁-Z₂-Z₃-Z₄, Z₁-Y₁-Y₂-Y₃-Y₄-X₁-X₂-Z₁-Z₂-Z₃-Z₄, Z₁-Y₁-Y₂-Y₃-Y₄-X₁-X₂-X₃-Z₁-Z₂-Z₃-Z₄, Z—Y₁-Y₂-Y₃-Y₄-X₁- X₂-X₃-X₄-Z₁-Z₂-Z₃-Z₄, Z₁-Z₂-Y₁-Y₂-X₁-X₂-Z₁-Z₂-Z₃-Z₄, Z₁-Z₂-Y₁-Y₂-X₁-X₂-X₃-Z₁-Z₂-Z₃-Z₄, Z₁-Z₂-Y₁-Y₂-X₁-X₂-X₃-X₄-Z₁-Z₂-Z₃-Z₄, Z₁-Z₂-Y₁-Y₂-Y₃-X₁-X₂-Z₁-Z₂-Z₃-Z₄, Z₁-Z₂-Y₁-Y₂-Y₃-X₁-X₂-X₃-Z₁-Z₂-Z₃-Z₄, Z₁-Z₂-Y₁-Y₂-Y₃-X₁-X₂-X₃-X₄-Z₁-Z₂-Z₃-Z₄, Z₁-Z₂-Y₁-Y₂-Y₃-Y₄-X₁-X₂-Z₁-Z₂-Z₃-Z₄, Z₁-Z₂-Y₁-Y₂-Y₃-Y₄-X₁-X₂-X₃-Z₁-Z₂-Z₃-Z₄, Z₁-Z₂-Y₁-Y₂-Y₃-Y₄-X₁-X₂-X₃-X₄-Z₁-Z₂-Z₃-Z₄, Z₁-Z₂-Z₃-Y₁-Y₂-X₁-X₂-Z₁-Z₂-Z₃-Z₄, Z₁-Z₂-Z₃-Y₁-Y₂-X₁-X₂-X₃-Z₁-Z₂-Z₃-Z₄, Z₁-Z₂-Z₃-Y₁-Y₂-X₁-X₂-X₃-X₄-Z₁-Z₂-Z₃-Z₄, Z₁-Z₂-Z₃-Y₁-Y₂-Y₃-X₁-X₂-Z₁-Z₂-Z₃-Z₄, Z₁-Z₂-Z₃-Y₁-Y₂-Y₃-X₁-X₂-X₃-Z₁-Z₂-Z₃-Z₄, Z₁-Z₂-Z₃-Y₁-Y₂-Y₃-X₁-X₂-X₃-X₄-Z₁-Z₂-Z₃-Z₄, Z₁-Z₂-Z₃-Y₁-Y₂-Y₃-Y₄-X₁-X₂-Z₁-Z₂-Z₃-Z₄, Z₁-Z₂-Z₃-Y₁-Y₂-Y₃-Y₄-X₁-X₂-X₃-Z₁-Z₂-Z₃-Z₄, Z₁-Z₂-Z₃-Y₁-Y₂-Y₃-Y₄-X₁-X₂-X₃-X₄-Z₁-Z₂-Z₃-Z₄, Z₁-Z₂-Z₃-Z₄—Y₁-Y₂-X₁-X₂-Z₁-Z₂-Z₃-Z₄, Z₁-Z₂-Z₃-Z₄-Y₁-Y₂-X₁-X₂-X₃-Z₁-Z₂-Z₃-Z₄, Z₁-Z₂-Z₃-Z₄-Y₁-Y₂-X₁-X₂-X₃-X₄-Z₁-Z₂-Z₃-Z₄, Z₁-Z₂-Z₃-Z₄-Y₁-Y₂-Y₃-X₁-X₂-Z₁-Z₂-Z₃-Z₄, Z₁-Z₂-Z₃-Z₄-Y₁-Y₂-Y₃-X₁-X₂-X₃-Z₁-Z₂-Z₃-Z₄, Z₁-Z₂-Z₃-Z₄-Y₁-Y₂-Y₃-X₁-X₂-X₃-X₄-Z₁-Z₂-Z₃-Z₄, Z₁-Z₂-Z₃-Z₄-Y₁-Y₂-Y₃-Y₄-X₁-X₂-Z₁-Z₂-Z₃-Z₄, Z₁-Z₂-Z₃-Z₄-Y₁-Y₂-Y₃-Y₄-X₁-X₂-X₃-Z₁-Z₂-Z₃-Z₄, Z₁-Z₂-Z₃-Z₄-Y₁-Y₂-Y₃-Y₄-X₁-X₂-X₃-X₄-Z₁-Z₂-Z₃-Z₄, Z₁-X₁-X₂-Y₁-Y₂, Z₁-X₁-X₂-X₃-Y₁-Y₂, Z₁-X₁-X₂-X₃-X₄-Y₁-Y₂, Z₁-X₁-X₂-Y₁-Y₂-Y₃, Z₁-X₁-X₂-X₃-Y₁-Y₂-Y₃, Z₁-X₁-X₂-X₃-X₄-Y₁-Y₂-Y₃, Z₁-X₁-X₂-Y₁-Y₂-Y₃-Y₄, Z₁-X₁-X₂-X₃-Y₁-Y₂-Y₃-Y₄, Z₁-X₁-X₂-X₃-X₄-Y₁-Y₂-Y₃-Y₄, Z₁-Z₂-X₁-X₂-Y₁-Y₂, Z₁-Z₂-X₁-X₂-X₃-Y₁-Y₂, Z₁-Z₂-X₁-X₂-X₃-X₄-Y₁-Y₂, Z₁-Z₂-X₁-X₂-Y₁-Y₂-Y₃, Z₁-Z₂-X₁-X₂-X₃-Y₁-Y₂-Y₃, Z₁-Z₂-X₁-X₂-X₃-X₄-Y₁-Y₂-Y₃, Z₁-Z₂-X₁-X₂-Y₁-Y₂-Y₃-Y₄, Z₁-Z₂-X₁-X₂-X₃-Y₁-Y₂-Y₃-Y₄, Z₁-Z₂-X₁-X₂-X₃-X₄-Y₁-Y₂-Y₃-Y₄, Z₁-Z₂-Z₃-X₁-X₂-Y₁-Y₂, Z₁-Z₂-Z₃-X₁-X₂-X₃-Y₁-Y₂, Z₁-Z₂-Z₃-X₁-X₂-X₃-X₄-Y₁-Y₂, Z₁-Z₂-Z₃-X₁-X₂-Y₁-Y₂-Y₃, Z₁-Z₂-Z₃-X₁-X₂-X₃-Y₁-Y₂-Y₃, Z₁-Z₂-Z₃-X₁-X₂-X₃-X₄-Y₁-Y₂-Y₃, Z₁-Z₂-Z₃-X₁-X₂-Y₁-Y₂-Y₃-Y₄, Z₁-Z₂-Z₃-X₁-X₂-X₃-Y₁-Y₂-Y₃-Y₄, Z₁-Z₂-Z₃-X₁-X₂-X₃-X₄-Y₁-Y₂-Y₃-Y₄, Z₁-Z₂-Z₃-Z₄-X₁-X₂-Y₁-Y₂, Z₁-Z₂-Z₃-Z₄-X₁-X₂-X₃-Y₁-Y₂, Z₁-Z₂-Z₃-Z₄-X₁-X₂-X₃-X₄-Y₁-Y₂, Z₁-Z₂-Z₃-Z₄-X₁-X₂-Y₁-Y₂-Y₃, Z₁-Z₂-Z₃-Z₄-X₁-X₂-X₃-Y₁-Y₂-Y₃, Z₁-Z₂-Z₃-Z₄-X₁-X₂-X₃-X₄-Y₁-Y₂-Y₃, Z₁-Z₂-Z₃-Z₄-X₁-X₂-Y₁-Y₂-Y₃-Y₄, Z₁-Z₂-Z₃-Z₄-X₁-X₂-X₃-Y₁-Y₂-Y₃-Y₄, Z₁-Z₂-Z₃-Z₄-X₁-X₂-X₃-X₄-Y₁-Y₂-Y₃-Y₄, Z₁-Y₁-Y₂-X₁-X₂, Z₁-Y₁-Y₂-X₁-X₂-X₃, Z₁-Y₁-Y₂-X₁-X₂-X₃-X₄, Z₁-Y₁-Y₂-Y₃-X₁-X₂, Z₁-Y₁-Y₂-Y₃-X₁-X₂-X₃, Z₁-Y₁-Y₂-Y₃-X₁-X₂-X₃-X₄, Z₁-Y₁-Y₂-Y₃-Y₄-X₁-X₂, Z₁-Y₁-Y₂-Y₃-Y₄-X₁-X₂-X₃, Z₁-Y₁-Y₂-Y₃-Y₄-X₁-X₂-X₃-X₄, Z₁-Z₂-Y₁-Y₂-X₁-X₂, Z₁-Z₂-Y₁-Y₂-X₁-X₂-X₃, Z₁-Z₂-Y₁-Y₂-X₁-X₂-X₃-X₄, Z₁-Z₂-Y₁-Y₂-Y₃-X₁-X₂, Z₁-Z₂-Y₁-Y₂-Y₃-X₁-X₂-X₃, Z₁-Z₂-Y₁-Y₂-Y₃-X₁-X₂-X₃-X₄, Z₁-Z₂-Y₁-Y₂-Y₃-Y₄-X₁-X₂, Z₁-Z₂-Y₁-Y₂-Y₃-Y₄-X₁-X₂-X₃, Z₁-Z₂-Y₁-Y₂-Y₃-Y₄-X₁-X₂-X₃-X₄, Z₁-Z₂-Z₃-Y₁-Y₂-X₁-X₂, Z₁-Z₂-Z₃-Y₁-Y₂-X₁-X₂-X₃, Z₁-Z₂-Z₃-Y₁-Y₂-X₁-X₂-X₃-X₄, Z₁-Z₂-Z₃-Y₁-Y₂-Y₃-X₁-X₂, Z₁-Z₂-Z₃-Y₁-Y₂-Y₃-X₁-X₂-X₃, Z₁-Z₂-Z₃-Y₁-Y₂-Y₃-X₁-X₂-X₃-X₄, Z₁-Z₂-Z₃-Y₁-Y₂-Y₃-Y₄-X₁-X₂, Z₁-Z₂-Z₃-Y₁-Y₂-Y₃-Y₄-X₁-X₂-X₃, Z₁-Z₂-Z₃-Y₁-Y₂-Y₃-Y₄-X₁-X₂-X₃-X₄, Z₁-Z₂-Z₃-Z₄-Y₁-Y₂-X₁-X₂, Z₁-Z₂-Z₃-Z₄-Y₁-Y₂-X₁-X₂-X₃, Z₁-Z₂-Z₃-Z₄-Y₁-Y₂-X₁-X₂-X₃-X₄, Z₁-Z₂-Z₃-Z₄-Y₁-Y₂-Y₃-X₁-X₂, Z₁-Z₂-Z₃-Z₄-Y₁-Y₂-Y₃-X₁-X₂-X₃, Z₁-Z₂-Z₃-Z₄-Y₁-Y₂-Y₃-X₁-X₂-X₃-X₄, Z₁-Z₂-Z₃-Z₄-Y₁-Y₂-Y₃-Y₄-X₁-X₂, Z₁-Z₂-Z₃-Z₄-Y₁-Y₂-Y₃-Y₄-X₁-X₂-X₃, Z₁-Z₂-Z₃-Z₄-Y₁-Y₂-Y₃-Y₄-X₁-X₂-X₃-X₄, X₁-X₂-Y₁-Y₂-Z₁, X₁-X₂-X₃-Y₁-Y₂-Z₁, X₁-X₂-X₃-X₄-Y₁-Y₂-Z₁, X₁-X₂-Y₁-Y₂-Y₃-Z₁, X₁-X₂-X₃-Y₁-Y₂-Y₃-Z₁, X₁-X₂-X₃-X₄-Y₁-Y₂-Y₃-Z₁, X₁-X₂-Y₁-Y₂-Y₃-Y₄-Z₁, X₁-X₂-X₃-Y₁-Y₂-Y₃-Y₄-Z₁, X₁-X₂-X₃-X₄-Y₁-Y₂-Y₃-Y₄-Z₁, X₁-X₂-Y₁-Y₂-Z₁-Z₂, X₁-X₂-X₃-Y₁-Y₂-Z₁-Z₂, X₁-X₂-X₃-X₄-Y₁-Y₂-Z₁-Z₂, X₁-X₂-Y₁-Y₂-Y₃-Z₁-Z₂, X₁-X₂-X₃-Y₁-Y₂-Y₃-Z₁-Z₂, X₁-X₂-X₃-X₄-Y₁-Y₂-Y₃-Z₁-Z₂, X₁-X₂-Y₁-Y₂-Y₃-Y₄-Z₁-Z₂, X₁-X₂-X₃-Y₁-Y₂-Y₃-Y₄-Z₁-Z₂, X₁-X₂-X₃-X₄-Y₁-Y₂-Y₃-Y₄-Z₁-Z₂, X₁-X₂-Y₁-Y₂-Z₁-Z₂-Z₃, X₁-X₂-X₃-Y₁-Y₂-Z₁-Z₂-Z₃, X₁-X₂-X₃-X₄-Y₁-Y₂-Z₁-Z₂-Z₃, X₁-X₂-Y₁-Y₂-Y₃-Z₁-Z₂-Z₃, X₁-X₂-X₃-Y₁-Y₂-Y₃-Z₁-Z₂-Z₃, X₁-X₂-X₃-X₄-Y₁-Y₂-Y₃-Z₁-Z₂-Z₃, X₁-X₂-Y₁-Y₂-Y₃-Y₄-Z₁-Z₂-Z₃, X₁-X₂-X₃-Y₁-Y₂-Y₃-Y₄-Z₁-Z₂-Z₃, X₁-X₂-X₃-X₄-Y₁-Y₂-Y₃-Y₄-Z₁-Z₂-Z₃, X₁-X₂-Y₁-Y₂-Z₁-Z₂-Z₃-Z₄, X₁-X₂-X₃-Y₁-Y₂-Z₁-Z₂-Z₃-Z₄, X₁-X₂-X₃-X₄-Y₁-Y₂-Z₁-Z₂-Z₃-Z₄, X₁-X₂-Y₁-Y₂-Y₃-Z₁-Z₂-Z₃-Z₄, X₁-X₂-X₃-Y₁-Y₂-Y₃-Z₁-Z₂-Z₃-Z₄, X₁-X₂-X₃-X₄-Y₁-Y₂-Y₃-Z₁-Z₂-Z₃-Z₄, X₁-X₂-Y₁-Y₂-Y₃-Y₄-Z₁-Z₂-Z₃-Z₄, X₁-X₂-X₃-Y₁-Y₂-Y₃-Y₄-Z₁-Z₂-Z₃-Z₄, X₁-X₂-X₃-X₄-Y₁-Y₂-Y₃-Y₄-Z₁-Z₂-Z₃-Z₄, Y₁-Y₂-X₁-X₂-Z₁, Y₁-Y₂-X₁-X₂-X₃-Z₁, Y₁-Y₂-X₁-X₂-X₃-X₄-Z₁, Y₁-Y₂-Y₃-X₁-X₂-Z₁, Y₁-Y₂-Y₃-X₁-X₂-X₃-Z₁, Y₁-Y₂-Y₃-X₁-X₂-X₃-X₄-Z₁, Y₁-Y₂-Y₃-Y₄-X₁-X₂-Z₁, Y₁-Y₂-Y₃-Y₄-X₁-X₂-X₃-Z₁, Y₁-Y₂-Y₃-Y₄-X₁-X₂-X₃-X₄-Z₁, Y₁-Y₂-X₁-X₂-Z₁-Z₂, Y₁-Y₂-X₁-X₂-X₃-Z₁-Z₂, Y₁-Y₂-X₁-X₂-X₃-X₄-Z₁-Z₂, Y₁-Y₂-Y₃-X₁-X₂-Z₁-Z₂, Y₁-Y₂-Y₃-X₁-X₂-X₃-Z₁-Z₂, Y₁-Y₂-Y₃-X₁-X₂-X₃-X₄-Z₁-Z₂, Y₁-Y₂-Y₃-Y₄-X₁-X₂-Z₁-Z₂, Y₁-Y₂-Y₃-Y₄-X₁-X₂-X₃-Z₁-Z₂, Y₁-Y₂-Y₃-Y₄-X₁-X₂-X₃-X₄-Z₁-Z₂, Y₁-Y₂-X₁-X₂-Z₁-Z₂-Z₃, Y₁-Y₂-X₁-X₂-X₃-Z₁-Z₂-Z₃, Y₁-Y₂-X₁-X₂-X₃-X₄-Z₁-Z₂-Z₃, Y₁-Y₂-Y₃-X₁-X₂-Z₁-Z₂-Z₃, Y₁-Y₂-Y₃-X₁-X₂-X₃-Z₁-Z₂-Z₃, Y₁-Y₂-Y₃-X₁-X₂-X₃-X₄-Z₁-Z₂-Z₃, Y₁-Y₂-Y₃-Y₄-X₁-X₂-Z₁-Z₂-Z₃, Y₁-Y₂-Y₃-Y₄-X₁-X₂-X₃-Z₁-Z₂-Z₃, Y₁-Y₂-Y₃-Y₄-X₁-X₂-X₃-X₄-Z₁-Z₂-Z₃, Y₁-Y₂-X₁-X₂-Z₁-Z₂-Z₃-Z₄, Y₁-Y₂-X₁-X₂-X₃-Z₁-Z₂-Z₃-Z₄, Y₁-Y₂-X₁-X₂-X₃-X₄-Z₁-Z₂-Z₃-Z₄, Y₁-Y₂-Y₃-X₁-X₂-Z₁-Z₂-Z₃-Z₄, Y₁-Y₂-Y₃-X₁-X₂-X₃-Z₁-Z₂-Z₃-Z₄, Y₁-Y₂-Y₃-X₁-X₂-X₃-X₄-Z₁-Z₂-Z₃-Z₄, Y₁-Y₂-Y₃-Y₄-X₁-X₂-Z₁-Z₂-Z₃-Z₄, Y₁-Y₂-Y₃-Y₄-X₁-X₂-X₃-Z₁-Z₂-Z₃-Z₄, Y₁-Y₂-Y₃-Y₄-X₁-X₂-X₃-X₄-Z₁-Z₂-Z₃-Z₄, Z₁-X₁-X₂-Y₁-Y₂, Z₁-X₁-X₂-X₃-Y₁-Y₂, Z₁-X₁-X₂-X₃-X₄-Y₁-Y₂, Z₁-X₁-X₂-Y₁-Y₂-Y₃, Z₁-X₁-X₂-X₃-Y₁-Y₂-Y₃, Z₁-X₁-X₂-X₃-X₄-Y₁-Y₂-Y₃, Z₁-X₁-X₂-Y₁-Y₂-Y₃-Y₄, Z₁-X₁-X₂-X₃-Y₁-Y₂-Y₃-Y₄, Z₁-X₁-X₂-X₃-X₄-Y₁-Y₂-Y₃-Y₄, Z₁-Z₂-X₁-X₂-Y₁-Y₂, Z₁-Z₂-X₁-X₂-X₃-Y₁-Y₂, Z₁-Z₂-X₁-X₂-X₃-X₄-Y₁-Y₂, Z₁-Z₂-X₁-X₂-Y₁-Y₂-Y₃, Z₁-Z₂-X₁-X₂-X₃-Y₁-Y₂-Y₃, Z₁-Z₂-X₁-X₂-X₃-X₄-Y₁-Y₂-Y₃, Z₁-Z₂-X₁-X₂-Y₁-Y₂-Y₃-Y₄, Z₁-Z₂-X₁-X₂-X₃-Y₁-Y₂-Y₃-Y₄, Z₁-Z₂-X₁-X₂-X₃-X₄-Y₁-Y₂-Y₃-Y₄, Z₁-Z₂-Z₃-X₁-X₂-Y₁-Y₂, Z₁-Z₂-Z₃-X₁-X₂-X₃-Y₁-Y₂, Z₁-Z₂-Z₃-X₁-X₂-X₃-X₄-Y₁-Y₂, Z₁-Z₂-Z₃-X₁-X₂-Y₁-Y₂-Y₃, Z₁-Z₂-Z₃-X₁-X₂-X₃-Y₁-Y₂-Y₃, Z₁-Z₂-Z₃-X₁-X₂-X₃-X₄-Y₁-Y₂-Y₃, Z₁-Z₂-Z₃-X₁-X₂-Y₁-Y₂-Y₃-Y₄, Z₁-Z₂-Z₃-X₁-X₂-X₃-Y₁-Y₂-Y₃-Y₄, Z₁-Z₂-Z₃-X₁-X₂-X₃-X₄-Y₁-Y₂-Y₃-Y₄, Z₁-Z₂-Z₃-Z₄-X₁-X₂-Y₁-Y₂, Z₁-Z₂-Z₃-Z₄-X₁-X₂-X₃-Y₁-Y₂, Z₁-Z₂-Z₃-Z₄-X₁-X₂-X₃-X₄-Y₁-Y₂, Z₁-Z₂-Z₃-Z₄-X₁-X₂-Y₁-Y₂-Y₃, Z₁-Z₂-Z₃-Z₄-X₁-X₂-X₃-Y₁-Y₂-Y₃, Z₁-Z₂-Z₃-Z₄-X₁-X₂-X₃-X₄-Y₁-Y₂-Y₃, Z₁-Z₂-Z₃-Z₄-X₁-X₂-Y₁-Y₂-Y₃-Y₄, Z₁-Z₂-Z₃-Z₄-X₁-X₂-X₃-Y₁-Y₂-Y₃-Y₄, Z₁-Z₂-Z₃-Z₄-X₁-X₂-X₃-X₄-Y₁-Y₂-Y₃-Y₄, X₁-X₂-Y₁-Y₂-Z₁, X₁-X₂-X₃-Y₁-Y₂-Z₁, X₁-X₂-X₃-X₄-Y₁-Y₂-Z₁, X₁-X₂-Y₁-Y₂-Y₃-Z₁, X₁-X₂-X₃-Y₁-Y₂-Y₃-Z₁, X₁-X₂-X₃-X₄-Y₁-Y₂-Y₃-Z₁, X₁-X₂-Y₁-Y₂-Y₃-Y₄-Z₁, X₁-X₂-X₃-Y₁-Y₂-Y₃-Y₄-Z₁, X₁-X₂-X₃-X₄-Y₁-Y₂-Y₃-Y₄-Z₁, Z₁-X₁-X₂-Y₁-Y₂-Z₁, Z₁-X₁-X₂-X₃-Y₁-Y₂-Z₁, Z₁-X₁-X₂-X₃-X₄-Y₁-Y₂-Z₁, Z₁-X₁-X₂-Y₁-Y₂-Y₃-Z₁, Z₁-X₁-X₂-X₃-Y₁-Y₂-Y₃-Z₁, Z₁-X₁-X₂-X₃-X₄-Y₁-Y₂-Y₃-Z₁, Z₁-X₁-X₂-Y₁-Y₂-Y₃-Y₄-Z₁, Z₁-X₁-X₂-X₃-Y₁-Y₂-Y₃-Y₄-Z₁, Z₁-X₁-X₂-X₃-X₄-Y₁-Y₂-Y₃-Y₄-Z₁, Z₁-Z₂-X₁-X₂-Y₁-Y₂-Z₁, Z₁-Z₂-X₁-X₂-X₃-Y₁-Y₂-Z₁, Z₁-Z₂-X₁-X₂-X₃-X₄-Y₁-Y₂-Z₁, Z₁-Z₂-X₁-X₂-Y₁-Y₂-Y₃-Z₁, Z₁-Z₂-X₁-X₂-X₃-Y₁-Y₂-Y₃-Z₁, Z₁-Z₂-X₁-X₂-X₃-X₄-Y₁-Y₂-Y₃-Z₁, Z₁-Z₂-X₁-X₂-Y₁-Y₂-Y₃-Y₄-Z₁, Z₁-Z₂-X₁-X₂-X₃-Y₁-Y₂-Y₃-Y₄-Z₁, Z₁-Z₂-X₁-X₂-X₃-X₄-Y₁-Y₂-Y₃-Y₄-Z₁, Z₁-Z₂-Z₃-X₁-X₂-Y₁-Y₂-Z₁, Z₁-Z₂-Z₃-X₁-X₂-X₃-Y₁-Y₂-Z₁, Z₁-Z₂-Z₃-X₁-X₂-X₃-X₄-Y₁-Y₂-Z₁, Z₁-Z₂-Z₃-X₁-X₂-Y₁-Y₂-Y₃-Z₁, Z₁-Z₂-Z₃-X₁-X₂-X₃-Y₁-Y₂-Y₃-Z₁, Z₁-Z₂-Z₃-X₁-X₂-X₃-X₄-Y₁-Y₂-Y₃-Z₁, Z₁-Z₂-Z₃-X₁-X₂-Y₁-Y₂-Y₃-Y₄-Z₁, Z₁-Z₂-Z₃-X₁-X₂-X₃-Y₁-Y₂-Y₃-Y₄-Z₁, Z₁-Z₂-Z₃-X₁-X₂-X₃-X₄-Y₁-Y₂-Y₃-Y₄-Z₁, Z₁-Z₂-Z₃-Z₄-X₁-X₂-Y₁-Y₂-Z₁, Z₁-Z₂-Z₃-Z₄-X₁-X₂-X₃-Y₁-Y₂-Z₁, Z₁-Z₂-Z₃-Z₄-X₁-X₂-X₃-X₄-Y₁-Y₂-Z₁, Z₁-Z₂-Z₃-Z₄-X₁-X₂-Y₁-Y₂-Y₃-Z₁, Z₁-Z₂-Z₃-Z₄-X₁-X₂-X₃-Y₁-Y₂-Y₃-Z₁, Z₁-Z₂-Z₃-Z₄-X₁-X₂-X₃-X₄-Y₁-Y₂-Y₃-Z₁, Z₁-Z₂-Z₃-Z₄-X₁-X₂-Y₁-Y₂-Y₃-Y₄-Z₁, Z₁-Z₂-Z₃-Z₄-X₁-X₂-X₃-Y₁-Y₂-Y₃-Y₄-Z₁, Z₁-Z₂-Z₃-Z₄-X₁-X₂-X₃-X₄-Y₁-Y₂-Y₃-Y₄-Z₁, X₁-X₂-Y₁-Y₂-Z₁-Z₂, X₁-X₂-X₃-Y₁-Y₂-Z₁-Z₂, X₁-X₂-X₃-X₄-Y₁-Y₂-Z₁-Z₂, X₁-X₂-Y₁-Y₂-Y₃-Z₁-Z₂, X₁-X₂-X₃-Y₁-Y₂-Y₃-Z₁-Z₂, X₁-X₂-X₃-X₄-Y₁-Y₂-Y₃-Z₁-Z₂, X₁-X₂-Y₁-Y₂-Y₃-Y₄-Z₁-Z₂, X₁-X₂-X₃-Y₁-Y₂-Y₃-Y₄-Z₁-Z₂, X₁-X₂-X₃-X₄-Y₁-Y₂-Y₃-Y₄-Z₁-Z₂, Z₁-X₁-X₂-Y₁-Y₂-Z₁-Z₂, Z₁-X₁-X₂-X₃-Y₁-Y₂-Z₁-Z₂, Z₁-X₁-X₂-X₃-X₄-Y₁-Y₂-Z₁-Z₂, Z₁-X₁-X₂-Y₁-Y₂-Y₃-Z₁-Z₂, Z₁-X₁-X₂-X₃-Y₁-Y₂-Y₃-Z₁-Z₂, Z₁-X₁-X₂-X₃-X₄-Y₁-Y₂-Y₃-Z₁-Z₂, Z₁-X₁-X₂-Y₁-Y₂-Y₃-Y₄-Z₁-Z₂, Z₁-X₁-X₂-X₃-Y₁-Y₂-Y₃-Y₄-Z₁-Z₂, Z₁-X₁-X₂-X₃-X₄-Y₁-Y₂-Y₃-Y₄-Z₁-Z₂, Z₁-Z₂-X₁-X₂-Y₁-Y₂-Z₁-Z₂, Z₁-Z₂-X₁-X₂-X₃-Y₁-Y₂-Z₁-Z₂, Z₁-Z₂-X₁-X₂-X₃-X₄-Y₁-Y₂-Z₁-Z₂, Z₁-Z₂-X₁-X₂-Y₁-Y₂-Y₃-Z₁-Z₂, Z₁-Z₂-X₁-X₂-X₃-Y₁-Y₂-Y₃-Z₁-Z₂, Z₁-Z₂-X₁-X₂-X₃-X₄-Y₁-Y₂-Y₃-Z₁-Z₂, Z₁-Z₂-X₁-X₂-Y₁-Y₂-Y₃-Y₄-Z₁-Z₂, Z₁-Z₂-X₁-X₂-X₃-Y₁-Y₂-Y₃-Y₄-Z₁-Z₂, Z₁-Z₂-X₁-X₂-X₃-X₄-Y₁-Y₂-Y₃-Y₄-Z₁-Z₂, Z₁-Z₂-Z₃-X₁-X₂-Y₁-Y₂-Z₁-Z₂, Z₁-Z₂-Z₃-X₁-X₂-X₃-Y₁-Y₂-Z₁-Z₂, Z₁-Z₂-Z₃-X₁-X₂-X₃-X₄-Y₁-Y₂-Z₁-Z₂, Z₁-Z₂-Z₃-X₁-X₂-Y₁-Y₂-Y₃-Z₁-Z₂, Z₁-Z₂-Z₃-X₁-X₂-X₃-Y₁-Y₂-Y₃-Z₁-Z₂, Z₁-Z₂-Z₃-X₁-X₂-X₃-X₄-Y₁-Y₂-Y₃-Z₁-Z₂, Z₁-Z₂-Z₃-X₁-X₂-Y₁-Y₂-Y₃-Y₄-Z₁-Z₂, Z₁-Z₂-Z₃-X₁-X₂-X₃-Y₁-Y₂-Y₃-Y₄-Z₁-Z₂, Z₁-Z₂-Z₃-X₁-X₂-X₃-X₄-Y₁-Y₂-Y₃-Y₄-Z₁-Z₂, Z₁-Z₂-Z₃-Z₄-X₁-X₂-Y₁-Y₂-Z₁-Z₂, Z₁-Z₂-Z₃-Z₄-X₁-X₂-X₃-Y₁-Y₂-Z₁-Z₂, Z₁-Z₂-Z₃-Z₄-X₁-X₂-X₃-X₄-Y₁-Y₂-Z₁-Z₂, Z₁-Z₂-Z₃-Z₄-X₁-X₂-Y₁-Y₂-Y₃-Z₁-Z₂, Z₁-Z₂-Z₃-Z₄-X₁-X₂-X₃-Y₁-Y₂-Y₃-Z₁-Z₂, Z₁-Z₂-Z₃-Z₄-X₁-X₂-X₃-X₄-Y₁-Y₂-Y₃-Z₁-Z₂, Z₁-Z₂-Z₃-Z₄-X₁-X₂-Y₁-Y₂-Y₃-Y₄-Z₁-Z₂, Z₁-Z₂-Z₃-Z₄-X₁-X₂-X₃-Y₁-Y₂-Y₃-Y₄-Z₁-Z₂, Z₁-Z₂-Z₃-Z₄-X₁-X₂-X₃-X₄—Y₁-Y₂-Y₃-Y₄-Z₁-Z₂, X₁-X₂-Y₁-Y₂-Z₁-Z₂-Z₃, X₁-X₂-X₃-Y₁-Y₂-Z₁-Z₂-Z₃, X₁-X₂-X₃-X₄-Y₁-Y₂-Z₁-Z₂-Z₃, X₁-X₂-Y₁-Y₂-Y₃-Z₁-Z₂-Z₃, X₁-X₂-X₃-Y₁-Y₂-Y₃-Z₁-Z₂-Z₃, X₁-X₂-X₃-X₄-Y₁-Y₂-Y₃-Z₁-Z₂-Z₃, X₁-X₂-Y₁-Y₂-Y₃-Y₄-Z₁-Z₂-Z₃, X₁-X₂-X₃-Y₁-Y₂-Y₃-Y₄-Z₁-Z₂-Z₃, X₁-X₂-X₃-X₄-Y₁-Y₂-Y₃-Y₄-Z₁-Z₂-Z₃, Z₁-X₁-X₂-Y₁-Y₂-Z₁-Z₂-Z₃, Z₁-X₁-X₂-X₃-Y₁-Y₂-Z₁-Z₂-Z₃, Z₁-X₁-X₂-X₃-X₄-Y₁-Y₂-Z₁-Z₂-Z₃, Z₁-X₁-X₂-Y₁-Y₂-Y₃-Z₁-Z₂-Z₃, Z₁-X₁-X₂-X₃-Y₁-Y₂-Y₃-Z₁-Z₂-Z₃, Z₁-X₁-X₂-X₃-X₄-Y₁-Y₂-Y₃-Z₁-Z₂-Z₃, Z₁-X₁-X₂-Y₁-Y₂-Y₃-Y₄-Z₁-Z₂-Z₃, Z₁-X₁-X₂-X₃-Y₁-Y₂-Y₃-Y₄-Z₁-Z₂-Z₃, Z₁-X₁-X₂-X₃-X₄-Y₁-Y₂-Y₃-Y₄-Z₁-Z₂-Z₃, Z₁-Z₂-X₁-X₂-Y₁-Y₂-Z₁-Z₂-Z₃, Z₁-Z₂-X₁-X₂-X₃-Y₁-Y₂-Z₁-Z₂-Z₃, Z₁-Z₂-X₁-X₂-X₃-X₄-Y₁-Y₂-Z₁-Z₂-Z₃, Z₁-Z₂-X₁-X₂-Y₁-Y₂-Y₃-Z₁-Z₂-Z₃, Z₁-Z₂-X₁-X₂-X₃-Y₁-Y₂-Y₃-Z₁-Z₂-Z₃, Z₁-Z₂-X₁-X₂-X₃-X₄-Y₁-Y₂-Y₃-Z₁-Z₂-Z₃, Z₁-Z₂-X₁-X₂-Y₁-Y₂-Y₃-Y₄-Z₁-Z₂-Z₃, Z₁-Z₂-X₁-X₂-X₃-Y₁-Y₂-Y₃-Y₄-Z₁-Z₂-Z₃, Z₁-Z₂-X₁-X₂-X₃-X₄-Y₁-Y₂-Y₃-Y₄-Z₁-Z₂-Z₃, Z₁-Z₂-Z₃-X₁-X₂-Y₁-Y₂-Z₁-Z₂-Z₃, Z₁-Z₂-Z₃-X₁-X₂-X₃-Y₁-Y₂-Z₁-Z₂-Z₃, Z₁-Z₂-Z₃-X₁-X₂-X₃-X₄-Y₁-Y₂-Z₁-Z₂-Z₃, Z₁-Z₂-Z₃-X₁-X₂-Y₁-Y₂-Y₃-Z₁-Z₂-Z₃, Z₁-Z₂-Z₃-X₁-X₂-X₃-Y₁-Y₂-Y₃-Z₁-Z₂-Z₃, Z₁-Z₂-Z₃-X₁-X₂-X₃-X₄—Y₁-Y₂-Y₃-Z₁-Z₂-Z₃, Z₁-Z₂-Z₃-X₁-X₂-Y₁-Y₂-Y₃-Y₄-Z₁-Z₂-Z₃, Z₁-Z₂-Z₃-X₁-X₂-X₃-Y₁-Y₂-Y₃-Y₄-Z₁-Z₂-Z₃, Z₁-Z₂-Z₃-X₁-X₂-X₃-X₄-Y₁-Y₂-Y₃-Y₄-Z₁-Z₂-Z₃, Z₁-Z₂-Z₃-Z₄-X₁-X₂-Y₁-Y₂-Z₁-Z₂-Z₃, Z₁-Z₂-Z₃-Z₄-X₁-X₂-X₃-Y₁-Y₂-Z₁-Z₂-Z₃, Z₁-Z₂-Z₃-Z₄-X₁-X₂-X₃-X₄-Y₁-Y₂-Z₁-Z₂-Z₃, Z₁-Z₂-Z₃-Z₄-X₁-X₂-Y₁-Y₂-Y₃-Z₁-Z₂-Z₃, Z₁-Z₂-Z₃-Z₄-X₁-X₂-X₃-Y₁-Y₂-Y₃-Z₁-Z₂-Z₃, Z₁-Z₂-Z₃-Z₄-X₁-X₂-X₃-X₄-Y₁-Y₂-Y₃-Z₁-Z₂-Z₃, Z₁-Z₂-Z₃-Z₄-X₁-X₂-Y₁-Y₂-Z₁-Z₂-Z₃, Z₁-Z₂-Z₃-Z₄-X₁-X₂-X₃-Y₁-Y₂-Y₃-Y₄-Z₁-Z₂-Z₃, Z₁-Z₂-Z₃-Z₄-X₁-X₂-X₃-X₄-Y₁-Y₂-Y₃-Y₄-Z₁-Z₂-Z₃, X₁-X₂-Y₁-Y₂-Z₁-Z₂-Z₃-Z₄, X₁-X₂-X₃-Y₁-Y₂-Z₁-Z₂-Z₃-Z₄, X₁-X₂-X₃-X₄-Y₁-Y₂-Z₁-Z₂-Z₃-Z₄, X₁-X₂-Y₁-Y₂-Y₃-Z₁-Z₂-Z₃-Z₄, X₁-X₂-X₃-Y₁-Y₂-Y₃-Z₁-Z₂-Z₃-Z₄, X₁-X₂-X₃-X₄-Y₁-Y₂-Y₃-Z₁-Z₂-Z₃-Z₄, X₁-X₂-Y₁-Y₂-Y₃-Y₄-Z₁-Z₂-Z₃-Z₄, X₁-X₂-X₃-Y₁-Y₂-Y₃-Y₄-Z₁-Z₂-Z₃-Z₄, X₁-X₂-X₃-X₄-Y₁-Y₂-Y₃-Y₄-Z₁-Z₂-Z₃-Z₄, Z₁-X₁-X₂-Y₁-Y₂-Z₁-Z₂-Z₃-Z₄, Z₁-X₁-X₂-X₃-Y₁-Y₂-Z₁-Z₂-Z₃-Z₄, Z₁-X₁-X₂-X₃-X₄-Y₁-Y₂-Z₁-Z₂-Z₃-Z₄, Z₁-X₁-X₂-Y₁-Y₂-Y₃-Z₁-Z₂-Z₃-Z₄, Z₁-X₁-X₂-X₃-Y₁-Y₂-Y₃-Z₁-Z₂-Z₃-Z₄, Z₁-X₁-X₂-X₃-X₄-Y₁-Y₂-Y₃-Z₁-Z₂-Z₃-Z₄, Z₁-X₁-X₂-Y₁-Y₂-Y₃-Y₄-Z₁-Z₂-Z₃-Z₄, Z₁-X₁-X₂-X₃-Y₁-Y₂-Y₃-Y₄-Z₁-Z₂-Z₃-Z₄, Z₁-X₁-X₂-X₃-X₄-Y₁-Y₂-Y₃-Y₄-Z₁-Z₂-Z₃-Z₄, Z₁-Z₂-X₁-X₂-Z₁-Z₂-Y₁-Y₂-Z₂-Z₃-Z₄, Z₁-Z₂-X₁-X₂-X₃-Y₁-Y₂-Z₁-Z₂-Z₃-Z₄, Z₁-Z₂-X₁-X₂-X₃-X₄-Y₁-Y₂-Z₁-Z₂-Z₃-Z₄, Z₁-Z₂-X₁-X₂-Y₁-Y₂-Y₃-Z₁-Z₂-Z₃-Z₄, Z₁-Z₂-X₁-X₂-X₃-Y₁-Y₂-Y₃-Z₁-Z₂-Z₃-Z₄, Z₁-Z₂-X₁-X₂-X₃-X₄-Y₁-Y₂-Y₃-Z₁-Z₂-Z₃-Z₄, Z₁-Z₂-X₁-X₂-Y₁-Y₂-Y₃-Y₄-Z₁-Z₂-Z₃-Z₄, Z₁-Z₂-X₁-X₂-X₃-Y₁-Y₂-Y₃-Y₄-Z₁-Z₂-Z₃-Z₄, Z₁-Z₂-X₁-X₂-X₃-X₄-Y₁-Y₂-Y₃-Y₄-Z₁-Z₂-Z₃-Z₄, Z₁-Z₂-Z₃-X₁-X₂-Y₁-Y₂-Z₁-Z₂-Z₃-Z₄, Z₁-Z₂-Z₃-X₁-X₂-X₃-Y₁-Y₂-Z₁-Z₂-Z₃-Z₄, Z₁-Z₂-Z₃-X₁-X₂-X₃-X₄-Y₁-Y₂-Z₁-Z₂-Z₃-Z₄, Z₁-Z₂-Z₃-X₁-X₂-Y₁-Y₂-Y₃-Z₁-Z₂-Z₃-Z₄, Z₁-Z₂-Z₃-X₁-X₂-X₃-Y₁-Y₂-Y₃-Z₁-Z₂-Z₃-Z₄, Z₁-Z₂-Z₃-X₁-X₂-X₃-X₄-Y₁-Y₂-Y₃-Z₁-Z₂-Z₃-Z₄, Z₁-Z₂-Z₃-X₁-X₂-Y₁-Y₂-Y₃-Y₄-Z₁-Z₂-Z₃-Z₄, Z₁-Z₂-Z₃-X₁-X₂-X₃-Y₁-Y₂-Y₃-Y₄-Z₁-Z₂-Z₃-Z₄, Z₁-Z₂-Z₃-X₁-X₂-X₃-X₄-Y₁-Y₂-Y₃-Y₄-Z₁-Z₂-Z₃-Z₄, Z₁-Z₂-Z₃-Z₄-X₁-X₂-Y₁-Y₂-Z₁-Z₂-Z₃-Z₄, Z₁-Z₂-Z₃-Z₄-X₁-X₂-X₃-Y₁-Y₂-Z₁-Z₂-Z₃-Z₄, Z₁-Z₂-Z₃-Z₄-X₁-X₂-X₃-X₄-Y₁-Y₂-Z₁-Z₂-Z₃-Z₄, Z₁-Z₂-Z₃-Z₄-X₁-X₂-Y₁-Y₂-Y₃-Z₁-Z₂-Z₃-Z₄, Z₁-Z₂-Z₃-Z₄-X₁-X₂-X₃-Y₁-Y₂-Y₃-Z₁-Z₂-Z₃-Z₄, Z₁-Z₂-Z₃-Z₄-X₁-X₂-X₃-X₄-Y₁-Y₂-Y₃-Z₁-Z₂-Z₃-Z₄, Z₁-Z₂-Z₃-Z₄-X₁-X₂-Y₁-Y₂-Y₃-Y₄-Z₁-Z₂-Z₃-Z₄, Z₁-Z₂-Z₃-Z₄-X₁-X₂-X₃-Y₁-Y₂-Y₃-Y₄-Z₁-Z₂-Z₃-Z₄, Z₁-Z₂-Z₃-Z₄-X₁-X₂-X₃-X₄-Y₁-Y₂-Y₃-Y₄-Z₁-Z₂-Z₃-Z₄, Z₁-Y₁-Y₂-X₁-X₂, Z₁-Y₁-Y₂-X₁-X₂-X₃, Z₁-Y₁-Y₂-X₁-X₂-X₃-X₄, Z₁-Y₁-Y₂-Y₃-X₁-X₂, Z₁-Y₁-Y₂-Y₃-X₁-X₂-X₃, Z₁-Y₁-Y₂-Y₃-X₁-X₂-X₃-X₄, Z₁-Y₁-Y₂-Y₃-Y₄-X₁-X₂, Z₁-Y₁-Y₂-Y₃-Y₄-X₁-X₂-X₃, Z₁-Y₁-Y₂-Y₃-Y₄-X₁-X₂-X₃-X₄, Z₁-Z₂-Y₁-Y₂-X₁-X₂, Z₁-Z₂-Y₁-Y₂-X₁-X₂-X₃, Z₁-Z₂-Y₁-Y₂-X₁-X₂-X₃-X₄, Z₁-Z₂-Y₁-Y₂-Y₃-X₁-X₂, Z₁-Z₂-Y₁-Y₂-Y₃-X₁-X₂-X₃, Z₁-Z₂-Y₁-Y₂-Y₃-X₁-X₂-X₃-X₄, Z₁-Z₂-Y₁-Y₂-Y₃-Y₄-X₁-X₂, Z₁-Z₂-Y₁-Y₂-Y₃-Y₄-X₁-X₂-X₃, Z₁-Z₂-Y₁-Y₂-Y₃-Y₄-X₁-X₂-X₃-X₄, Z₁-Z₂-Z₃-Y₁-Y₂-X₁-X₂, Z₁-Z₂-Z₃-Y₁-Y₂-X₁-X₂-X₃, Z₁-Z₂-Z₃-Y₁-Y₂-X₁-X₂-X₃-X₄, Z₁-Z₂-Z₃-Y₁-Y₂-Y₃-X₁-X₂, Z₁-Z₂-Z₃-Y₁-Y₂-Y₃-X₁-X₂-X₃, Z₁-Z₂-Z₃-Y₁-Y₂-Y₃-X₁-X₂-X₃-X₄, Z₁-Z₂-Z₃-Y₁-Y₂-Y₃-Y₄-X₁-X₂, Z₁-Z₂-Z₃-Y₁-Y₂-Y₃-Y₄-X₁-X₂-X₃, Z₁-Z₂-Z₃-Y₁-Y₂-Y₃-Y₄-X₁-X₂-X₃-X₄, Z₁-Z₂-Z₃-Z₄-Y₁-Y₂-X₁-X₂, Z₁-Z₂-Z₃-Z₄-Y₁-Y₂-X₁-X₂-X₃, Z₁-Z₂-Z₃-Z₄—Y₁-Y₂-X₁-X₂-X₃-X₄, Z₁-Z₂-Z₃-Z₄-Y₁-Y₂-Y₃-X₁-X₂, Z₁-Z₂-Z₃-Z₄-Y₁-Y₂-Y₃-X₁-X₂-X₃, Z₁-Z₂-Z₃-Z₄-Y₁-Y₂-Y₃-X₁-X₂-X₃-X₄, Z₁-Z₂-Z₃-Z₄-Y₁-Y₂-Y₃-Y₄-X₁-X₂, Z₁-Z₂-Z₃-Z₄-Y₁-Y₂-Y₃-Y₄-X₁-X₂-X₃, Z₁-Z₂-Z₃-Z₄-Y₁-Y₂-Y₃-Y₄-X₁-X₂-X₃-X₄, Y₁-Y₂-X₁-X₂-Z₁, Y₁-Y₂-X₁-X₂-X₃-Z₁, Y₁-Y₂-X₁-X₂-X₃-X₄-Z₁, Y₁-Y₂-Y₃-X₁-X₂-Z₁, Y₁-Y₂-Y₃-X₁-X₂-X₃-Z₁, Y₁-Y₂-Y₃-X₁-X₂-X₃-X₄-Z₁, Y₁-Y₂-Y₃-Y₄-X₁-X₂-Z₁, Y₁-Y₂-Y₃-Y₄-X₁-X₂-X₃-Z₁, Y₁-Y₂-Y₃-Y₄-X₁-X₂-X₃-X₄-Z₁, Z₁-Y₁-Y₂-X₁-X₂-Z₁, Z₁-Y₁-Y₂-X₁-X₂-X₃-Z₁, Z₁-Y₁-Y₂-X₁-X₂-X₃-X₄-Z₁, Z₁-Y₁-Y₂-Y₃-X₁-X₂-Z₁, Z₁-Y₁-Y₂-Y₃-X₁-X₂-X₃-Z₁, Z₁-Y₁-Y₂-Y₃-X₁-X₂-X₃-X₄-Z₁, Z₁-Y₁-Y₂-Y₃-Y₄-X₁-X₂-Z₁, Z₁-Y₁-Y₂-Y₃-Y₄-X₁-X₂-X₃-Z₁, Z₁-Y₁-Y₂-Y₃-Y₄-X₁-X₂-X₃-X₄-Z₁, Z₁-Z₂-Y₁-Y₂-X₁-X₂-Z₁, Z₁-Z₂-Y₁-Y₂-X₁-X₂-X₃-Z₁, Z₁-Z₂-Y₁-Y₂-X₁-X₂-X₃-X₄-Z₁, Z₁-Z₂-Y₁-Y₂-Y₃-X₁-X₂-Z₁, Z₁-Z₂-Y₁-Y₂-Y₃-X₁-X₂-X₃-Z₁, Z₁-Z₂-Y₁-Y₂-Y₃-X₁-X₂-X₃-X₄-Z₁, Z₁-Z₂-Y₁-Y₂-Y₃-Y₄-X₁-X₂-Z₁, Z₁-Z₂-Y₁-Y₂-Y₃-Y₄-X₁-X₂-X₃-Z₁, Z₁-Z₂-Y₁-Y₂-Y₃-Y₄-X₁-X₂-X₃-X₄-Z₁, Z₁-Z₂-Z₃-Y₁-Y₂-X₁-X₂-Z₁, Z₁-Z₂-Z₃-Y₁-Y₂-X₁-X₂-X₃-Z₁, Z₁-Z₂-Z₃-Y₁-Y₂-X₁-X₂-X₃-X₄-Z₁, Z₁-Z₂-Z₃-Y₁-Y₂-Y₃-X₁-X₂-Z₁, Z₁-Z₂-Z₃-Y₁-Y₂-Y₃-X₁-X₂-X₃-Z₁, Z₁-Z₂-Z₃-Y₁-Y₂-Y₃-X₁-X₂-X₃-X₄-Z₁, Z₁-Z₂-Z₃-Y₁-Y₂-Y₃-Y₄-X₁-X₂-Z₁, Z₁-Z₂-Z₃-Y₁-Y₂-Y₃-Y₄-X₁-X₂-X₃-Z₁, Z₁-Z₂-Z₃-Y₁-Y₂-Y₃-Y₄-X₁-X₂-X₃-X₄-Z₁, Z₁-Z₂-Z₃-Z₄-Y₁-Y₂-X₁-X₂-Z₁, Z₁-Z₂-Z₃-Z₄-Y₁-Y₂-X₁-X₂-X₃-Z₁, Z₁-Z₂-Z₃-Z₄-Y₁-Y₂-X₁-X₂-X₃-X₄-Z₁, Z₁-Z₂-Z₃-Z₄-Y₁-Y₂-Y₃-X₁-X₂-Z₁, Z₁-Z₂-Z₃-Z₄-Y₁-Y₂-Y₃-X₁-X₂-X₃-Z₁, Z₁-Z₂-Z₃-Z₄-Y₁-Y₂-Y₃-X₁-X₂-X₃-X₄-Z₁, Z₁-Z₂-Z₃-Z₄-Y₁-Y₂-Y₃-Y₄-X₁-X₂-Z₁, Z₁-Z₂-Z₃-Z₄-Y₁-Y₂-Y₃-Y₄-X₁-X₂-X₃-Z₁, Z₁-Z₂-Z₃-Z₄-Y₁-Y₂-Y₃-Y₄-X₁-X₂-X₃-X₄-Z₁, Y₁-Y₂-X₁-X₂-Z₁-Z₂, Y₁-Y₂-X₁-X₂-X₃-Z₁-Z₂, Y₁-Y₂-X₁-X₂-X₃-X₄-Z₁-Z₂, Y₁-Y₂-Y₃-X₁-X₂-Z₁-Z₂, Y₁-Y₂-Y₃-X₁-X₂-X₃-Z₁-Z₂, Y₁-Y₂-Y₃-X₁-X₂-X₃-X₄-Z₁-Z₂, Y₁-Y₂-Y₃-Y₄-X₁-X₂-Z₁-Z₂, Y₁-Y₂-Y₃-Y₄-X₁-X₂-X₃-Z₁-Z₂, Y₁-Y₂-Y₃-Y₄-X₁-X₂-X₃-X₄-Z₁-Z₂, Z₁-Y₁-Y₂-X₁-X₂-Z₁-Z₂, Z₁-Y₁-Y₂-X₁-X₂-X₃-Z₁-Z₂, Z₁-Y₁-Y₂-X₁-X₂-X₃-X₄-Z₁-Z₂, Z₁-Y₁-Y₂-Y₃-X₁-X₂-Z₁-Z₂, Z₁-Y₁-Y₂-Y₃-X₁-X₂-X₃-Z₁-Z₂, Z₁-Y₁-Y₂-Y₃-X₁-X₂-X₃-X₄-Z₁-Z₂, Z₁-Y₁-Y₂-Y₃-Y₄-X₁-X₂-Z₁-Z₂, Z₁-Y₁-Y₂-Y₃-Y₄-X₁-X₂-X₃-Z₁-Z₂, Z₁-Y₁-Y₂-Y₃-Y₄-X₁-X₂-X₃-X₄-Z₁-Z₂, Z₁-Z₂-Y₁-Y₂-X₁-X₂-Z₁-Z₂, Z₁-Z₂-Y₁-Y₂-X₁-X₂-X₃-Z₁-Z₂, Z₁-Z₂-Y₁-Y₂-X₁-X₂-X₃-X₄-Z₁-Z₂, Z₁-Z₂-Y₁-Y₂-Y₃-X₁-X₂-Z₁-Z₂, Z₁-Z₂-Y₁-Y₂-Y₃-X₁-X₂-X₃-Z₁-Z₂, Z₁-Z₂-Y₁-Y₂-Y₃-X₁-X₂-X₃-X₄-Z₁-Z₂, Z₁-Z₂-Y₁-Y₂-Y₃-Y₄-X₁-X₂-Z₁-Z₂, Z₁-Z₂-Y₁-Y₂-Y₃-Y₄-X₁-X₂-X₃-Z₁-Z₂, Z₁-Z₂-Y₁-Y₂-Y₃-Y₄-X₁-X₂-X₃-X₄-Z₁-Z₂, Z₁-Z₂-Z₃-Y₁-Y₂-X₁-X₂-Z₁-Z₂, Z₁-Z₂-Z₃-Y₁-Y₂-X₁-X₂-X₃-Z₁-Z₂, Z₁-Z₂-Z₃-Y₁-Y₂-X₁-X₂-X₃-X₄-Z₁-Z₂, Z₁-Z₂-Z₃-Y₁-Y₂-Y₃-X₁-X₂-Z₁-Z₂, Z₁-Z₂-Z₃-Y₁-Y₂-Y₃-X₁-X₂-X₃-Z₁-Z₂, Z₁-Z₂-Z₃-Y₁-Y₂-Y₃-X₁-X₂-X₃-X₄-Z₁-Z₂, Z₁-Z₂-Z₃-Y₁-Y₂-Y₃-Y₄-X₁-X₂-Z₁-Z₂, Z₁-Z₂-Z₃-Y₁-Y₂-Y₃-Y₄-X₁-X₂-X₃-Z₁-Z₂, Z₁-Z₂-Z₃-Y₁-Y₂-Y₃-Y₄-X₁-X₂-X₃-X₄-Z₁-Z₂, Z₁-Z₂-Z₃-Z₄-Y₁-Y₂-X₁-X₂-Z₁-Z₂, Z₁-Z₂-Z₃-Z₄-Y₁-Y₂-X₁-X₂-X₃-Z₁-Z₂, Z₁-Z₂-Z₃-Z₄-Y₁-Y₂-X₁-X₂-X₃-X₄-Z₁-Z₂, Z₁-Z₂-Z₃-Z₄-Y₁-Y₂-Y₃-X₁-X₂-Z₁-Z₂, Z₁-Z₂-Z₃-Z₄-Y₁-Y₂-Y₃-X₁-X₂-X₃-Z₁-Z₂, Z₁-Z₂-Z₃-Z₄-Y₁-Y₂-Y₃-X₁-X₂-X₃-X₄-Z₁-Z₂, Z₁-Z₂-Z₃-Z₄-Y₁-Y₂-Y₃-Y₄-X₁-X₂-Z₁-Z₂, Z₁-Z₂-Z₃-Z₄-Y₁-Y₂-Y₃-Y₄-X₁-X₂-X₃-Z₁-Z₂, Z₁-Z₂-Z₃-Z₄-Y₁-Y₂-Y₃-Y₄-X₁-X₂-X₃-X₄-Z₁-Z₂, Y₁-Y₂-X₁-X₂-Z₁-Z₂-Z₃, Y₁-Y₂-X₁-X₂-X₃-Z₁-Z₂-Z₃, Y₁-Y₂-X₁-X₂-X₃-X₄-Z₁-Z₂-Z₃, Y₁-Y₂-Y₃-X₁-X₂-Z₁-Z₂-Z₃, Y₁-Y₂-Y₃-X₁-X₂-X₃-Z₁-Z₂-Z₃, Y₁-Y₂-Y₃-X₁-X₂-X₃-X₄-Z₁-Z₂-Z₃, Y₁-Y₂-Y₃-Y₄-X₁-X₂-Z₁-Z₂-Z₃, Y₁-Y₂-Y₃-Y₄-X₁-X₂-X₃-Z₁-Z₂-Z₃, Y₁-Y₂-Y₃-Y₄-X₁-X₂-X₃-X₄-Z₁-Z₂-Z₃, Z₁-Y₁-Y₂-X₁-X₂-Z₁-Z₂-Z₃, Z₁-Y₁-Y₂-X₁-X₂-X₃-Z₁-Z₂-Z₃, Z₁-Y₁-Y₂-X₁-X₂-X₃-X₄-Z₁-Z₂-Z₃, Z₁-Y₁-Y₂-Y₃-X₁-X₂-Z₁-Z₂-Z₃, Z₁-Y₁-Y₂-Y₃-X₁-X₂-X₃-Z₁-Z₂-Z₃, Z₁-Y₁-Y₂-Y₃-X₁-X₂-X₃-X₄-Z₁-Z₂-Z₃, Z₁-Y₁-Y₂-Y₃-Y₄-X₁-X₂-Z₁-Z₂-Z₃, Z₁-Y₁-Y₂-Y₃-Y₄-X₁-X₂-X₃-Z₁-Z₂-Z₃, Z₁-Y₁-Y₂-Y₃-Y₄-X₁-X₂-X₃-X₄-Z₁-Z₂-Z₃, Z₁-Z₂-Y₁-Y₂-X₁-X₂-Z₁-Z₂-Z₃, Z₁-Z₂-Y₁-Y₂-X₁-X₂-X₃-X₄-Z₁-Z₂-Z₃, Z₁-Z₂-Y₁-Y₂-Y₃-X₁-X₂-Z₁-Z₂-Z₃, Z₁-Z₂-Y₁-Y₂-Y₃-X₁-X₂-X₃-Z₁-Z₂-Z₃, Z₁-Z₂-Y₁-Y₂-Y₃-X₁-X₂-X₃-X₄-Z₁-Z₂-Z₃, Z₁-Z₂-Y₁-Y₂-Y₃-Y₄-X₁-X₂-Z₁-Z₂-Z₃, Z₁-Z₂-Y₁-Y₂-Y₃-Y₄-X₁-X₂-X₃-Z₁-Z₂-Z₃, Z₁-Z₂-Y₁-Y₂-Y₃-Y₄-X₁-X₂-X₃-X₄-Z₁-Z₂-Z₃, Z₁-Z₂-Z₃-Y₁-Y₂-X₁-X₂-Z₁-Z₂-Z₃, Z₁-Z₂-Z₃-Y₁-Y₂-X₁-X₂-X₃-Z₁-Z₂-Z₃, Z₁-Z₂-Z₃-Y₁-Y₂-X₁-X₂-X₃-X₄-Z₁-Z₂-Z₃, Z₁-Z₂-Z₃-Y₁-Y₂-Y₃-X₁-X₂-Z₁-Z₂-Z₃, Z₁-Z₂-Z₃-Y₁-Y₂-Y₃-X₁-X₂-X₃-Z₁-Z₂-Z₃, Z₁-Z₂-Z₃-Y₁-Y₂-Y₃-X₁-X₂-X₃-X₄-Z₁-Z₂-Z₃, Z₁-Z₂-Z₃-Y₁-Y₂-Y₃-Y₄-X₁-X₂-Z₁-Z₂-Z₃, Z₁-Z₂-Z₃-Y₁-Y₂-Y₃-Y₄-X₁-X₂-X₃-Z₁-Z₂-Z₃, Z₁-Z₂-Z₃-Y₁-Y₂-Y₃-Y₄-X₁-X₂-X₃-X₄-Z₁-Z₂-Z₃, Z₁-Z₂-Z₃-Z₄-Y₁-Y₂-X₁-X₂-Z₁-Z₂-Z₃, Z₁-Z₂-Z₃-Z₄-Y₁-Y₂-X₁-X₂-X₃-Z₁-Z₂-Z₃, Z₁-Z₂-Z₃-Z₄-Y₁-Y₂-X₁-X₂-X₃-X₄-Z₁-Z₂-Z₃, Z₁-Z₂-Z₃-Z₄-Y₁-Y₂-Y₃-X₁-X₂-Z₁-Z₂-Z₃, Z₁-Z₂-Z₃-Z₄—Y₁-Y₂-Y₃-X₁-X₂-X₃-Z₁-Z₂-Z₃, Z₁-Z₂-Z₃-Z₄-Y₁-Y₂-Y₃-X₁-X₂-X₃-X₄-Z₁-Z₂-Z₃, Z₁-Z₂-Z₃-Z₄-Y₁-Y₂-Y₃-Y₄-X₁-X₂-X₃-Z₁-Z₂-Z₃, Z₁-Z₂-Z₃-Z₄-Y₁-Y₂-Y₃-Y₄-X₁-X₂-X₃-Z₁-Z₂-Z₃, Z₁-Z₂-Z₃-Z₄-Y₁-Y₂-Y₃-Y₄-X₁-X₂-X₃-X₄-Z₁-Z₂-Z₃, Y₁-Y₂-X₁-X₂-Z₁-Z₂-Z₃-Z₄, Y₁-Y₂-X₁-X₂-X₃-Z₁-Z₂-Z₃-Z₄, Y₁-Y₂-X₁-X₂-X₃-X₄-Z₁-Z₂-Z₃-Z₄, Y₁-Y₂-Y₃-X₁-X₂-Z₁-Z₂-Z₃-Z₄, Y₁-Y₂-Y₃-X₁-X₂-X₃-Z₁-Z₂-Z₃-Z₄, Y₁-Y₂-Y₃-X₁-X₂-X₃-X₄-Z₁-Z₂-Z₃-Z₄, Y₁-Y₂-Y₃-Y₄-X₁-X₂-Z₁-Z₂-Z₃-Z₄, Y₁-Y₂-Y₃-Y₄-X₁-X₂-X₃-Z₁-Z₂-Z₃-Z₄, Y₁-Y₂-Y₃-Y₄-X₁-X₂-X₃-X₄-Z₁-Z₂-Z₃-Z₄, Z₁-Y₁-Y₂-X₁-X₂-Z₁-Z₂-Z₃-Z₄, Z₁-Y₁-Y₂-X₁-X₂-X₃-Z₁-Z₂-Z₃-Z₄, Z₁-Y₁-Y₂-X₁-X₂-X₃-X₄-Z₁-Z₂-Z₃-Z₄, Z₁-Y₁-Y₂-Y₃-X₁-X₂-Z₁-Z₂-Z₃-Z₄, Z₁-Y₁-Y₂-Y₃-X₁-X₂-X₃-Z₁-Z₂-Z₃-Z₄, Z₁-Y₁-Y₂-Y₃-X₁-X₂-X₃-X₄-Z₁-Z₂-Z₃-Z₄, Z₁-Y₁-Y₂-Y₃-Y₄-X₁-X₂-Z₁-Z₂-Z₃-Z₄, Z₁-Y₁-Y₂-Y₃-Y₄-X₁-X₂-X₃-Z₁-Z₂-Z₃-Z₄, Z₁-Y₁-Y₂-Y₃-Y₄-X₁-X₂-X₃-X₄-Z₁-Z₂-Z₃-Z₄, Z₁-Z₂-Y₁-Y₂-X₁-X₂-Z₁-Z₂-Z₃-Z₄, Z₁-Z₂-Y₁-Y₂-X₁-X₂-X₃-Z₁-Z₂-Z₃-Z₄, Z₁-Z₂-Y₁-Y₂-X₁-X₂-X₃-X₄-Z₁-Z₂-Z₃-Z₄, Z₁-Z₂-Y₁-Y₂-Y₃-X₁-X₂-Z₁-Z₂-Z₃-Z₄, Z₁-Z₂-Y₁-Y₂-Y₃-X₁-X₂-X₃-Z₁-Z₂-Z₃-Z₄, Z₁-Z₂-Y₁-Y₂-Y₃-X₁-X₂-X₃-X₄-Z₁-Z₂-Z₃-Z₄, Z₁-Z₂-Y₁-Y₂-Y₃-Y₄-X₁-X₂-Z₁-Z₂-Z₃-Z₄, Z₁-Z₂-Y₁-Y₂-Y₃-Y₄-X₁-X₂-X₃-Z₁-Z₂-Z₃-Z₄, Z₁-Z₂-Y₁-Y₂-Y₃-Y₄-X₁-X₂-X₃-X₄-Z₁-Z₂-Z₃-Z₄, Z₁-Z₂-Z₃-Y₁-Y₂-X₁-X₂-Z₁-Z₂-Z₃-Z₄, Z₁-Z₂-Z₃-Y₁-Y₂-X₁-X₂-X₃-Z₁-Z₂-Z₃-Z₄, Z₁-Z₂-Z₃-Y₁-Y₂-X₁-X₂-X₃-X₄-Z₁-Z₂-Z₃-Z₄, Z₁-Z₂-Z₃-Y₁-Y₂-Y₃-X₁-X₂-Z₁-Z₂-Z₃-Z₄, Z₁-Z₂-Z₃-Y₁-Y₂-Y₃-X₁-X₂-X₃-Z₁-Z₂-Z₃-Z₄, Z₁-Z₂-Z₃-Y₁-Y₂-Y₃-X₁-X₂-X₃-X₄-Z₁-Z₂-Z₃-Z₄, Z₁-Z₂-Z₃-Y₁-Y₂-Y₃-Y₄-X₁-X₂-Z₁-Z₂-Z₃-Z₄, Z₁-Z₂-Z₃-Y₁-Y₂-Y₃-Y₄-X₁-X₂-X₃-Z₁-Z₂-Z₃-Z₄, Z₁-Z₂-Z₃-Y₁-Y₂-Y₃-Y₄-X₁-X₂-X₃-X₄-Z₁-Z₂-Z₃-Z₄, Z₁-Z₂-Z₃-Z₄-Y₁-Y₂-X₁-X₂-Z₁-Z₂-Z₃-Z₄, Z₁-Z₂-Z₃-Z₄-Y₁-Y₂-X₁-X₂-X₃-Z₁-Z₂-Z₃-Z₄, Z₁-Z₂-Z₃-Z₄-Y₁-Y₂-X₁-X₂-X₃-X₄-Z₁-Z₂-Z₃-Z₄, Z₁-Z₂-Z₃-Z₄-Y₁-Y₂-Y₃-X₁-X₂-Z₁-Z₂-Z₃-Z₄, Z₁-Z₂-Z₃-Z₄-Y₁₂-Y₃-X₁-X₂-X₃-Z₁-Z₂-Z₃-Z₄, Z₁-Z₂-Z₃-Z₄-Y₁-Y₂-Y₃₃-X₃-X₄-Z₁-Z₂-Z₃-Z₄, Z₁-Z₂-Z₃-Z₄-Y₁-Y₂-Y₃-Y₄-X₁-X₂-Z₁-Z₂-Z₃-Z₄, Z₁-Z₂-Z₃-Z₄-Y₁-Y₂-Y₃-Y₄-X₁-X₂-X₃-Z₁-Z₂-Z₃-Z₄, Z₁-Z₂-Z₃-Z₄-Y₁-Y₂-Y₃-Y₄-X₁-X₂-X₃-X₄-Z₁-Z₂-Z₃-Z₄, wherein X₁ is selected from the group consisting of: (all single letter amino acid format) A, D, E, G, I, K, L, N, P, Q, R, and V; X₂ is selected from the group consisting of A, F, G, I, K, L, N, P, Q, R, S, T, V, and Y; X₃ is selected from the group consisting of A, D, E, F, G, I, K, L, N, Q, R, S, T, V, and Y; X₄ is selected from the group consisting of: R, H, K, D, E, S, T, N, Q, G, A, I, L, M, F, W, Y, and V. In some embodiments, Y₁ is selected from the group consisting of: (all single letter amino acid format) A, D, E, F, G, I, L, N, Q, S, T, V, and Y; Y₂ is selected from the group consisting of F, G, I, L, and Y; and Y₃ is selected from the group consisting of A, D, E, F, G, I, K, L, R, S, T, V, and Y; and Y₄ is selected from the group consisting of: R, H, K, D, E, S, T, N, Q, G, A, I, L, M, F, W, Y, and V.

[0243] In related embodiments, cleavable binary linker peptides (L) comprising an X region and a Y region are described above, and exemplary Z regions (1-4 amino acid sequences, for example, 2 amino acid sequences) that may be fused in frame to the X and/or Y regions (either to the N-terminal sequence of an X or Y region, or the C-terminal sequence of an X or Y region) described above form the tertiary cleavable linking peptides. Illustrative Z or spacer amino acid sequences may include: AA, AF, AM, AN, AQ, AV, AW, AY, DA, DD, DE, DF, DG, DI, DL, DP, DS, DT, DV, DW, DY, EA, ED, EE, EF, EG, EI, EL, EP, ES, ET, EV, EW, EY, FA, FD, FE, FF, FI, FK, FL, FM, FN, FQ, FR, FS, FT, FV, FW, FY, GA, GD, GE, GF, GI, GL, GM, GN, GQ, GS, GV, GW, GY, HA, HD, HE, HF, HH, HI, HK, HL, HN, HP, HQ, HR, HS, HT, HV, HY, IA, ID, IE, IG, IH, II, IK, IL, IM, IN, IP, IQ, IR, IS, IT, IV, IW, KA, KD, KE, KF, KI, KL, KN, KQ, KV, KY, LA, LD, LE, LG, LH, LI, LK, LL, LM, LN, LP, LQ, LR, LS, LT, LV, LW, MA, MF, MG, MI, MK, ML, MM, MN, MQ, MR, MS, MT, MV, MY, NA, ND, NE, NF, NI, NL, NM, NN, NQ, NS, NT, NV, NY, QA, QD, QE, QF, QI, QL, QM, QN, QQ, QS, QT, QV, QY, RA, RD, RE, RF, RI, RL, RN, RQ, RV, RY, SA, SF, SG, SK, SN, SP, SQ, SR, SS, ST, SV, SW, SY, TA, TF, TG, TK, TN, TP, TQ, TR, TS, TT, TV, TW, TY, VA, VF, VM, VN, VQ, VV, VW, VY, WA, WF, WI, WK, WL, WN, WP, WQ, WR, WS, WT, WV, WW, WY, YA, YD, YE, YF, YI, YK, YL, YM, YN, YQ, YR, YS, YT, YV, YW, or YY. In exemplary embodiments, individual tertiary peptides of the present invention can include a two amino acid sequence, fused in frame to the N-terminus and/or the C-terminus of an illustrative binary peptide disclosed above, wherein the two amino acid sequence is AM, LH, MN, ES, WQ, or DT.

[0244] In exemplary embodiments, individual tertiary peptides of the present invention can include a two amino acid sequence, fused in frame to the N-terminus and/or the C-terminus of an illustrative binary peptide disclosed above, wherein the two amino acid sequence is GS, WN, WQ, MA or MV.

[0245] In some embodiments, the spacer portion of the tertiary peptide (Z region) comprises the amino acid sequence GS, which may be fused in frame to the N-terminus or C-terminus of the binary peptide or both.

[0246] In various embodiments, exemplary binary peptides for use in the insecticidal and/or nematicidal polypeptides and proteins, DNA constructs and polynucleotides encoding an insecticidal and/or nematicidal polypeptide and protein and incorporated into a transgenic plants or part thereof, of the present invention, may include one or more cleavable tertiary peptides selected from the group of or consisting of: a binary peptide selected from IFVRLR (SEQ ID NO: 1619), ALKLFV (SEQ ID NO: 1605), ALKFLV (SEQ ID NO: 1603), RRKAFV (SEQ ID NO: 1644), or LFAAPF (SEQ ID NO: 1621), fused in frame either on the N-terminus, C-terminus or both termini with a Z region or spacer sequence selected from the group of or consisting of GS, WN, WQ, MA, MV, AM, LH, MN, ES, WQ, or DT.

[0247] In some embodiments, an exemplary DNA construct may encode an insecticidal and/or nematicidal protein comprising a cleavable tertiary peptide having one or more of the following illustrative amino acid sequences (ZXY or XYZ): AFVRLFGS (SEQ ID NO: 1649), AKLFVGS (SEQ ID NO: 1650), ALFALKGS (SEQ ID NO: 1651), ALFLKGS (SEQ ID NO: 1652), ALFLRGS (SEQ ID NO: 1653), ALFRGS (SEQ ID NO: 1654), ALFRLRGS (SEQ ID NO: 1655), ALKALFGS (SEQ ID NO: 1656), ALKFFGS (SEQ ID NO: 1657), ALKFLVGS (SEQ ID NO: 1658), ALKIFVGS (SEQ ID NO: 1659), ALKLFVGS (SEQ ID NO: 1660), FFADIKGS (SEQ ID NO: 1661), FFALKGS (SEQ ID NO: 1662), FFLKGS (SEQ ID NO: 1663), FFLRGS (SEQ ID NO: 1664), FFRLRGS (SEQ ID NO: 1665), FGYRIKGS (SEQ ID NO: 1666), FLRLFGS (SEQ ID NO: 1667), FYARRGS (SEQ ID NO: 1668), GGLRKKGS (SEQ ID NO: 1669), IFVALKGS (SEQ ID NO: 1670), IFVLKGS (SEQ ID NO: 1671), IFVLRGS (SEQ ID NO: 1672), IFVRGS (SEQ ID NO: 1673), IFVRLRGS (SEQ ID NO: 1674), ILFNIKGS (SEQ ID NO: 1675), LFAAPFGS (SEQ ID NO: 1676), LFVALKGS (SEQ ID NO: 1677), LFVLKGS (SEQ ID NO: 1678), LFVLRGS (SEQ ID NO: 1679), LFVRGS (SEQ ID NO: 1680), LFVRLRGS (SEQ ID NO: 1681), LFVRVFLGS (SEQ ID NO: 1682), LGERGS (SEQ ID NO: 1683), LKALFGS (SEQ ID NO: 1684), LKFFGS (SEQ ID NO: 1685), LKIFVGS (SEQ ID NO: 1686), LKLFVGS (SEQ ID NO: 1687), LRALFGS (SEQ ID NO: 1688), LRFFGS (SEQ ID NO: 1689), LRIFVGS (SEQ ID NO: 1690), LRLFVGS (SEQ ID NO: 1691), RALFGS (SEQ ID NO: 1692), RIFVGS (SEQ ID NO: 1693), RLFVGS (SEQ ID NO: 1694), RLRALFGS (SEQ ID NO: 1695), RLRFFGS (SEQ ID NO: 1696), RLRIFVGS (SEQ ID NO: 1697), RLRLFVGS (SEQ ID NO: 1698), RRKAFVGS (SEQ ID NO: 1699), RRKLIFGS (SEQ ID NO: 1700), RRRFFAGS (SEQ ID NO: 1701), VFGRKGGS (SEQ ID NO: 1702), YFVRKGS (SEQ ID NO: 1703), GSAFVRLF (SEQ ID NO: 1704), GSAKLFV (SEQ ID NO: 1705), GSALFALK (SEQ ID NO: 1706), GSALFLK (SEQ ID NO: 1707), GSALFLR (SEQ ID NO: 1708), GSALFR (SEQ ID NO: 1709), GSALFRLR (SEQ ID NO: 1710), GSALKALF (SEQ ID NO: 1711), GSALKFF (SEQ ID NO: 1712), GSALKFLV (SEQ ID NO: 1713), GSALKIFV (SEQ ID NO: 1714), GSALKLFV (SEQ ID NO: 1715), GSFFADIK (SEQ ID NO: 1716), GSFFALK (SEQ ID NO: 1717), GSFFLK (SEQ ID NO: 1718), GSFFLR (SEQ ID NO: 1719), GSFFRLR (SEQ ID NO: 1720), GSFGYRIK (SEQ ID NO: 1721), GSFLRLF (SEQ ID NO: 1722), GSFYARR (SEQ ID NO: 1723), GSGGLRKK (SEQ ID NO: 1724), GSIFVALK (SEQ ID NO: 1725), GSIFVLK (SEQ ID NO: 1726), GSIFVLR (SEQ ID NO: 1727), GSIFVR (SEQ ID NO: 1728), GSIFVRLR (SEQ ID NO: 1729), GSILFNIK (SEQ ID NO: 1730), GSLFAAPF (SEQ ID NO: 1731), GSLFVALK (SEQ ID NO: 1732), GSLFVLK (SEQ ID NO: 1733), GSLFVLR (SEQ ID NO: 1734), GSLFVR (SEQ ID NO: 1735), GSLFVRLR (SEQ ID NO: 1736), GSLFVRVFL (SEQ ID NO: 1737), GSLGER (SEQ ID NO: 1738), GSLKALF (SEQ ID NO: 1739), GSLKFF (SEQ ID NO: 1740), GSLKIFV (SEQ ID NO: 1741), GSLKLFV (SEQ ID NO: 1742), GSLRALF (SEQ ID NO: 1743), GSLRFF (SEQ ID NO: 1744), GSLRIFV (SEQ ID NO: 1745), GSLRLFV (SEQ ID NO: 1746), GSRALF (SEQ ID NO: 1747), GSRIFV (SEQ ID NO: 1748), GSRLFV (SEQ ID NO: 1749), GSRLRALF (SEQ ID NO: 1750), GSRLRFF (SEQ ID NO: 1751), GSRLRIFV (SEQ ID NO: 1752), GSRLRLFV (SEQ ID NO: 1753), GSRRKAFV (SEQ ID NO: 1754), GSRRKLIF (SEQ ID NO: 1755), GSRRRFFA (SEQ ID NO: 1756), GSVFGRKG (SEQ ID NO: 1757), and GSYFVRK (SEQ ID NO: 1758).

[0248] In various embodiments, the DNA construct comprises a polynucleotide that encodes a tertiary peptide having the amino acid sequence of a binary peptide with the addition of a spacer to the N-terminus of the binary peptide, and/or to the C-terminus of the binary peptide, wherein the spacer is an amino acid or peptide comprising 1 to 4 amino acids, preferably two amino acids, for example GS, WN, WQ, MA, or MV. Other specific spacer examples and optimal amino acids for use as spacers are provided below.

[0249] In some embodiments, an exemplary DNA construct encoding an insecticidal and/or nematicidal protein comprises one or more polynucleotides which in combination or singly encode one or more binary peptides comprising the amino acid sequence: IFVRLR (SEQ ID NO: 1619), ALKLFV (SEQ ID NO: 1605), ALKFLV (SEQ ID NO: 1603), RRKAFV (SEQ ID NO: 1644), or LFAAPF (SEQ ID NO: 1621) fused in frame at the N-terminal and/or the C-terminal with one or more spacer sequences selected from the amino acid sequences: GS, WN, WQ, MA, MV, AM, LH, MN, ES, WQ, and DT. In various embodiments, an exemplary DNA construct for use in transforming or transfecting a eukaryotic cell, for example, a yeast cell, or a plant cell comprises a polynucleotide that encodes an insecticidal and/or nematicidal protein that includes one or more cleavable tertiary peptides selected from the group of or consisting of: a binary peptide selected from IFVRLR (SEQ ID NO: 1619), ALKLFV (SEQ ID NO: 1605), ALKFLV (SEQ ID NO: 1603), RRKAFV (SEQ ID NO: 1644), or LFAAPF (SEQ ID NO: 1621), fused in frame either on the N-terminus, C-terminus or both termini with a Z region or spacer sequence selected from the group of or consisting of GS, WN, WQ, MA, MV, AM, LH, MN, ES, WQ, or DT and one or more TPs as described herein, for example, a CRIP TP, for example, an ICK TP or a non-ICK CRIP TP, a TMOF TP, or a Bt TP as exemplified throughout the present disclosure. In related embodiments, the one or more binary or tertiary peptides (designated linker L) described above are fused in frame with a TP, and optionally, an ERSP and/or optionally a STA, for example, (from N-terminus to C-terminus): (L-TP)ₙ-L, or (L-TP-L)ₙ, (ERSP)-(STA)-(L-TP)ₙ, or (ERSP)-(STA)-(L-TP)ₙ-(L), or (ERSP)-(STA)-(TP-L)ₙ, or (ERSP)-(STA)-(L)-(TP-L)ₙ, or (STA)-(L-TP)ₙ, or (STA)-(L-TP)ₙ-(L), or (STA)-(TP-L)ₙ, or (STA)-(L)-(TP-L)ₙ, wherein n is 1 to 200, for example, from 1-100, or from 1-20, or from 1-10. In embodiments related to the above, the insecticidal and/or nematicidal protein encoded by the one or more polynucleotides may contain TPs that are the same or different, and binary and/or tertiary peptides that are the same or different. In related embodiments of the above, tertiary peptides (designated above as L), may include the amino acid sequence of a binary peptide selected from IFVRLR (SEQ ID NO: 1619), ALKLFV (SEQ ID NO: 1605), ALKFLV (SEQ ID NO: 1603), RRKAFV (SEQ ID NO: 1644), or LFAAPF (SEQ ID NO: 1621), fused in frame either on the N-terminus, C-terminus or both termini of the binary peptide with a Z region or spacer sequence selected from the group of or consisting of GS, WN, WQ, MA, MV, AM, LH, MN, ES, WQ, or DT.

[0250] In related embodiments of the above, TPs useful in the manufacture of a DNA construct or polynucleotide encoding: (1) an insecticidal and/or nematicidal protein, which may include one or more ICK TPs, for example, a TP selected from an “ACTX” or “ACTX peptide” family of insecticidal ICK peptides that have been isolated from an Australian funnel-web spiders belonging to the Atracinae subfamily, for example, one or more TPs selected from an Omega-ACTX TP, a Kappa-ACTX TP and an U-ACTX TP, for example, U+2-ACTX-Hv1a, U-ACTX-Hv1a, rU-ACTX-Hv1a, rU-ACTX-Hv1b or a TP having at least 80%, at least 85%, at least 90%, at least 95%, at least 96%, at least 97%, at least 98%, at least 99%, or at least 100% sequence identity or sequence homology to a peptide or protein having an amino acid sequence as set forth in SEQ ID NOs: 5, 6 and 1761, 1762, 1767, 1771-1773, and variants thereof, (wherein the TPs, if more than one, may be the same or different) and each insecticidal and/or nematicidal protein further comprising one or more tertiary peptides (designated above as L), which may include the amino acid sequence of a binary peptide selected from IFVRLR (SEQ ID NO: 1619), ALKLFV (SEQ ID NO: 1605), ALKFLV (SEQ ID NO: 1603), RRKAFV (SEQ ID NO: 1644), or LFAAPF (SEQ ID NO: 1621), fused in frame either on the N-terminus, C-terminus or both termini of the binary peptide with a Z region or spacer sequence selected from the group of or consisting of GS, WN, WQ, MA, MV, AM, LH, MN, ES, WQ, or DT, wherein the TPs, if more than one, may be the same or different, and each insecticidal and/or nematicidal protein further comprising one or more tertiary peptides (designated above as L), which may include the amino acid sequence of a binary peptide selected from IFVRLR (SEQ ID NO: 1619), ALKLFV (SEQ ID NO: 1605), ALKFLV (SEQ ID NO: 1603), RRKAFV (SEQ ID NO: 1644), or LFAAPF (SEQ ID NO: 1621), fused in frame either on the N-terminus, C-terminus or both termini of the binary peptide with a Z region or spacer sequence selected from the group of or consisting of GS, WN, WQ, MA, MV, AM, LH, MN, ES, WQ, or DT.

[0251] In various embodiments, the DNA construct of the present invention encodes an insecticidal and/or nematicidal TP that contains one or more binary and/or tertiary peptides as described herein. The one or more binary and/or tertiary peptides are cleavable linking units that can be cleaved in both an animal gut environment, for example a human gut through the action of a human digestive protease, and also in the gut environment of an insect or nematode. The various proteases available in the gut of an animal, for example a human gut, and an insect or nematode are provided herein. In some embodiments, the DNA construct of the present invention encodes an insecticidal and/or nematicidal TP that contains one or more binary and/or tertiary peptides which are cleavable in the gut of a Lepidoptera or a Coleoptera insect species. The same DNA constructs which encode a binary and/or tertiary peptide which is cleavable in the gut of a Lepidoptera or a Coleoptera insect species is also cleavable in a human gut via the action of a human digestive protease.

[0252] As disclosed herein DNA constructs are also provided that comprise a polynucleotide that encodes a cleavable binary and/or tertiary peptide fused in frame to a TP, which when in the presence of an appropriate gut protease is released from the encoded binary and/or tertiary peptide, and provides insecticidal and/or nematicidal activity in the intended target insect or nematode. In various embodiments, the TP can be a class of TPs commonly referred to as CRIP peptides, ICK TPs, non-ICK TPs, e.g. sea anemone peptides, TMOF peptides and Bt proteins. In some embodiments, the TP is a protein selected from the group consisting of a Pore Forming Insecticidal Protein (PFIP) and a Cysteine Rich Insecticidal Protein (CRIP). The compositions and methods of the present invention can utilize any amino acid polymer based TP, including those described in International PCT Application Serial No. PCT/US2013/030042 filed on Mar. 8, 2013, the contents of the disclosure are incorporated by reference herein in its entirety.

[0253] The present invention also relates to nucleic acid constructs comprising a polynucleotide encoding an insecticidal and/or nematicidal protein comprising at least one cleavable linker and one TP. IN some embodiments, the nucleic acid construct can be a DNA nucleic acid construct or an RNA nucleic acid construct. In some embodiments of the present invention, a nucleic acid construct can include at least one coding sequence operable to encode at least one insecticidal and/or nematicidal protein operably linked to one or more control sequences that direct the expression of the coding sequence in a suitable host cell under conditions compatible with the control sequences. The term “operably linked” means a configuration in which a control sequence is placed at an appropriate position relative to the coding sequence of a polynucleotide such that the control sequence directs expression of the coding sequence.

[0254] The polynucleotide may be manipulated in a variety of ways to provide for expression of an insecticidal and/or nematicidal protein. Manipulation of the polynucleotide prior to its insertion into a vector may be desirable or necessary depending on the expression vector. The techniques for modifying polynucleotides utilizing recombinant DNA methods are well known in the art.

[0255] The control sequence may be or include a promoter, a polynucleotide which is recognized by a host cell for expression of the polynucleotide. The promoter contains transcriptional control sequences that mediate the expression of the insecticidal and/or nematicidal protein. The promoter may be any polynucleotide that shows transcriptional activity in the host cell including mutant, truncated, and hybrid promoters, and may be obtained from genes encoding extracellular or intracellular polypeptides either homologous or heterologous to the host cell.

[0256] In a yeast host, useful promoters are obtained from the genes for Saccharomyces cerevisiae enolase (ENO-1), Saccharomyces cerevisiae galactokinase (GAL1), Saccharomyces cerevisiae alcohol dehydrogenase/glyceraldehyde-3-phosphate dehydrogenase (ADH1, ADH2/GAP), Saccharomyces cerevisiae triose phosphate isomerase (TPI), Saccharomyces cerevisiae metallothionein (CUP1), and Saccharomyces cerevisiae 3-phosphoglycerate kinase. Other useful promoters for yeast host cells are described by Romanos et al., 1992, Yeast 8:423-488.

[0257] The control sequence may also be a transcription terminator, which is recognized by a host cell to terminate transcription. The terminator sequence is operably linked to the 3′-terminus of the polynucleotide encoding the insecticidal and/or nematicidal protein. Any terminator that is functional in the host cell may be used. Preferred terminators for bacterial host cells are obtained from the genes for Bacillus clausii alkaline protease (aprH), Bacillus licheniformis alpha-amylase (amyL), and Escherichia coli ribosomal RNA (rrnB). Preferred terminators for yeast host cells are obtained from the genes for Saccharomyces cerevisiae enolase, Saccharomyces cerevisiae cytochrome C (CYC1), and Saccharomyces cerevisiae glyceraldehyde-3-phosphate dehydrogenase. Other useful terminators for yeast host cells are described by Romanos et al., 1992, supra. The control sequence may also be an mRNA stabilizer region downstream of a promoter and upstream of the coding sequence of a gene which increases expression of the gene.

[0258] The control sequence may also include a leader, a nontranslated region of an mRNA that is important for translation by the host cell. The leader sequence is operably linked to the 5′-terminus of the polynucleotide encoding the insecticidal and/or nematicidal protein. Any leader that is functional in the host cell may be used. Suitable leaders for yeast host cells are obtained from the genes for Saccharomyces cerevisiae enolase (ENO-1), Saccharomyces cerevisiae 3-phosphoglycerate kinase, Saccharomyces cerevisiae alpha-factor, and Saccharomyces cerevisiae alcohol dehydrogenase/glyceraldehyde-3-phosphate dehydrogenase (ADH2/GAP).

[0259] The control sequence may also include a polyadenylation sequence, a sequence operably linked to the 3′-terminus of the insecticidal and/or nematicidal protein-encoding sequence and, when transcribed, is recognized by the host cell as a signal to add polyadenosine residues to transcribed mRNA. Any polyadenylation sequence that is functional in the host cell may be used. Useful polyadenylation sequences for yeast host cells are described by Guo and Sherman, 1995, Mol. Cellular Biol. 15:5983-5990.

[0260] It may also be desirable to add regulatory sequences that regulate expression of the insecticidal and/or nematicidal protein relative to the growth of the host cell. Examples of regulatory systems are those that cause expression of the gene to be turned on or off in response to a chemical or physical stimulus, including the presence of a regulatory compound. Regulatory systems in prokaryotic systems include the lac, tac, and trp operator systems. In yeast, the ADH2 system or GAL1 system may be used. Other examples of regulatory sequences are those that allow for gene amplification. In eukaryotic systems, these regulatory sequences include the dihydrofolate reductase gene that is amplified in the presence of methotrexate, and the metallothionein genes that are amplified with heavy metals. In these cases, the polynucleotide encoding the insecticidal and/or nematicidal would be operably linked with the regulatory sequence.

[0261] Expression Vectors

[0262] The present invention also relates to recombinant expression vectors comprising a polynucleotide encoding an insecticidal and/or nematicidal protein of the present invention, a promoter, and transcriptional and translational stop signals. The various nucleotide and control sequences may be joined together to produce a recombinant expression vector that may include one or more convenient restriction sites to allow for insertion or substitution of the polynucleotide encoding the insecticidal and/or nematicidal protein at such sites. Alternatively, the polynucleotide may be expressed by inserting the polynucleotide or a nucleic acid construct comprising the polynucleotide into an appropriate vector for expression. In creating the expression vector, the coding sequence is located in the vector so that the coding sequence is operably linked with the appropriate control sequences for expression.

[0263] The recombinant expression vector may be any vector (e.g., a plasmid or virus) that can be conveniently subjected to recombinant DNA procedures and can bring about expression of the polynucleotide. The choice of the vector will typically depend on the compatibility of the vector with the host cell into which the vector is to be introduced. The vector may be a linear or closed circular plasmid. The vector may be an autonomously replicating vector, i.e., a vector that exists as an extrachromosomal entity, the replication of which is independent of chromosomal replication, e.g., a plasmid, an extrachromosomal element, a minichromosome, or an artificial chromosome. The vector may contain any means for assuring self-replication. Alternatively, the vector may be one that, when introduced into the host cell, is integrated into the genome, for example, a plant genome, and replicated together with the chromosome(s) into which it has been integrated. Furthermore, a single vector or plasmid or two or more vectors or plasmids that together contain the total DNA to be introduced into the genome of the host cell, or a transposon, may be used.

[0264] The vector preferably contains one or more selectable markers that permit easy selection of transformed, transfected, transduced, or the like cells. A selectable marker is a gene the product of which provides for biocide or viral resistance, resistance to heavy metals, prototrophy to auxotrophs, and the like. Examples of bacterial selectable markers are Bacillus licheniformis or Bacillus subtilis dal genes, or markers that confer antibiotic resistance such as ampicillin, chloramphenicol, kanamycin, neomycin, spectinomycin or tetracycline resistance. Suitable markers for yeast host cells include, but are not limited to, ADE2, HIS3, LEU2, LYS2, MET3, TRP 1, and URA3. Selectable markers for use in a filamentous fungal host cell include, but are not limited to, amdS (acetamidase), argB (ornithine carbamoyltransferase), bar (phosphinothricin acetyltransferase), hph (hygromycin phosphotransferase), niaD (nitrate reductase), pyrG (orotidine-5′-phosphate decarboxylase), sC (sulfate adenyltransferase), and trpC (anthranilate synthase), as well as equivalents thereof.

[0265] The vector preferably contains an element(s) that permits integration of the vector into the host cell's genome or autonomous replication of the vector in the cell independent of the genome. For integration into the host cell genome, the vector may rely on the polynucleotide's sequence encoding the insecticidal and/or nematicidal protein or any other element of the vector for integration into the genome by homologous or non-homologous recombination. Alternatively, the vector may contain additional polynucleotides for directing integration by homologous recombination into the genome of the host cell at a precise location(s) in the chromosome(s). To increase the likelihood of integration at a precise location, the integrational elements should contain a sufficient number of nucleic acids, such as 100 to 10,000 base pairs, 400 to 10,000 base pairs, and 800 to 10,000 base pairs, which have a high degree of sequence identity to the corresponding target sequence to enhance the probability of homologous recombination. The integrational elements may be any sequence that is homologous with the target sequence in the genome of the host cell. Furthermore, the integrational elements may be non-encoding or encoding polynucleotides. On the other hand, the vector may be integrated into the genome of the host cell by non-homologous recombination.

[0266] For autonomous replication, the vector may further comprise an origin of replication enabling the vector to replicate autonomously in the host cell in question. The origin of replication may be any plasmid replicator mediating autonomous replication that functions in a cell. The term “origin of replication” or “plasmid replicator” means a polynucleotide that enables a plasmid or vector to replicate in vivo. Examples of bacterial origins of replication are the origins of replication of plasmids pBR322, pUC 19, pACYC 177, and pACYC 184 permitting replication in E. coli, and pUB110, pE194, pTA1060, and pAM.beta.1 permitting replication in Bacillus. Examples of origins of replication for use in a yeast host cell are the 2 micron origin of replication, ARS1, ARS4, the combination of ARS 1 and CEN3, and the combination of ARS4 and CEN6. More than one copy of a polynucleotide of the present invention may be inserted into a host cell to increase production of an insecticidal and/or nematicidal protein. An increase in the copy number of the polynucleotide can be obtained by integrating at least one additional copy of the sequence into the host cell genome or by including an amplifiable selectable marker gene with the polynucleotide where cells containing amplified copies of the selectable marker gene, and thereby additional copies of the polynucleotide, can be selected for by cultivating the cells in the presence of the appropriate selectable agent. The procedures used to ligate the elements described above to construct the recombinant expression vectors of the present invention are well known to one skilled in the art (see, e.g., Sambrook et al., 1989, supra).

[0267] (4B). ERSP Fused to a Binary or Tertiary Peptide Fused in Frame to a Construct (TP-L)ₙ

[0268] In some embodiments, each insecticidal and/or nematicidal protein can include an ERSP fused to a binary or tertiary peptide which is fused in frame to a construct comprising: (TP-L)ₙ wherein TP is a toxic protein, L is a binary or tertiary peptide and n is an integer ranging from 1 to 200. See FIG. 4. In some of these embodiments, the TPs in the insecticidal and/or nematicidal protein may be the same or different.

[0269] All of these classes of TPs are described herein and all of these classes may be incorporated into the DNA constructs described herein wherein at least one TP is encoded in frame with at least one binary or tertiary peptide, preferably two or more TPs are flanked in frame by at least one or at least two cleavable binary or tertiary peptides for example: (ERSP)-(L)-TP-(L)-TP, (ERSP)-(L)-TP-(L)-TP-(L), (L-TP)ₙ-L, (L-TP-L)ₙ, (ERSP)-(TP-L)ₙ, (ERSP)-(L)-(TP-L)ₙ, (ERSP)-(L-TP)ₙ, (ERSP)-(L-TP)ₙ-(L), (ERSP)-(STA)-(L-TP)ₙ, (ERSP)-(STA)-(L-TP)ₙ-(L), (ERSP)-(STA)-(TP-L)ₙ, or (ERSP)-(STA)-(L)-(TP-L)ₙ, or (STA)-(L-TP)ₙ, or (STA)-(L-TP)ₙ-(L), or (STA)-(TP-L)ₙ, or (STA)-(L)-(TP-L)ₙ, wherein (L) is a binary peptide or a tertiary peptide, and which each L may be the same or different, TP is a toxic peptide, which may be the same or different, and n is an integer ranging from 1 to 200, preferably 1 to 100, and most preferably, 1 to 10. See FIGS. 4 and 5.

[0270] In some embodiments, the present invention provides insecticidal and/or nematicidal proteins and DNA constructs comprising a polynucleotide that encodes an insecticidal and/or nematicidal protein that may comprise one or more binary and/or tertiary peptides and one or more TPs. Each of the binary and/or tertiary peptides may be the same or different and each of the TPs may be the same or different. In some embodiments, the present invention provides insecticidal and/or nematicidal proteins and DNA constructs comprising a polynucleotide that encodes an insecticidal and/or nematicidal protein that may comprise two or more binary and/or tertiary peptides and two or more TPs. Each of the binary and/or tertiary peptides may be the same or different and each of the TPs may be the same or different. In one illustrative embodiment, the present invention provides a DNA construct comprising at least one polynucleotide operably linked to an operable promoter, for example, a homologous or heterologous promoter, wherein the polynucleotide encodes an insecticidal and/or nematicidal protein having one or more TPs and two or more cleavable binary or tertiary peptides. See FIG. 2.

[0271] In another related aspect, the present invention provides an insecticidal and/or nematicidal protein, wherein the insecticidal and/or nematicidal protein comprises an ERSP fused in frame with the N-terminus of a binary or tertiary peptide, the binary or tertiary peptide is fused in frame with a construct comprising (TP-L)ₙ or the insecticidal and/or nematicidal protein comprises an ERSP fused the N-terminus of a binary or tertiary peptide, the binary or tertiary peptide is fused in frame with a construct comprising (L-TP)ₙ.

[0272] In related embodiments, DNA constructs described herein at least one TP is encoded in frame with at least one binary or tertiary peptide, preferably two or more TPs are flanked in frame by at least one or at least two cleavable binary or tertiary peptides cleavable binary linker peptides (L) comprising an X region and a Y region are described above, and exemplary Z regions (1-4 amino acid sequences, for example, 2 amino acid sequences) that may be fused in frame to the X and/or Y regions (either to the N-terminal sequence of an X or Y region, or the C-terminal sequence of an X or Y region) described above form the tertiary cleavable linking peptides. Illustrative Z or spacer amino acid sequences may include: AA, AF, AM, AN, AQ, AV, AW, AY, DA, DD, DE, DF, DG, DI, DL, DP, DS, DT, DV, DW, DY, EA, ED, EE, EF, EG, EI, EL, EP, ES, ET, EV, EW, EY, FA, FD, FE, FF, FI, FK, FL, FM, FN, FQ, FR, FS, FT, FV, FW, FY, GA, GD, GE, GF, GI, GL, GM, GN, GQ, GS, GV, GW, GY, HA, HD, HE, HF, HH, HI, HK, HL, HN, HP, HQ, HR, HS, HT, HV, HY, IA, ID, IE, IG, IH, II, IK, IL, IM, IN, IP, IQ, IR, IS, IT, IV, IW, KA, KD, KE, KF, KI, KL, KN, KQ, KV, KY, LA, LD, LE, LG, LH, LI, LK, LL, LM, LN, LP, LQ, LR, LS, LT, LV, LW, MA, MF, MG, MI, MK, ML, MM, MN, MQ, MR, MS, MT, MV, MY, NA, ND, NE, NF, NI, NL, NM, NN, NQ, NS, NT, NV, NY, QA, QD, QE, QF, QI, QL, QM, QN, QQ, QS, QT, QV, QY, RA, RD, RE, RF, RI, RL, RN, RQ, RV, RY, SA, SF, SG, SK, SN, SP, SQ, SR, SS, ST, SV, SW, SY, TA, TF, TG, TK, TN, TP, TQ, TR, TS, TT, TV, TW, TY, VA, VF, VM, VN, VQ, VV, VW, VY, WA, WF, WI, WK, WL, WN, WP, WQ, WR, WS, WT, WV, WW, WY, YA, YD, YE, YF, YI, YK, YL, YM, YN, YQ, YR, YS, YT, YV, YW, or YY. In exemplary embodiments, individual tertiary peptides of the present invention can include a two amino acid sequence, fused in frame to the N-terminus and/or the C-terminus of an illustrative binary peptide disclosed above, wherein the two amino acid sequence is AM, LH, MN, ES, WQ, or DT.

[0273] In exemplary embodiments, individual tertiary peptides of the present invention can include a two amino acid sequence, fused in frame to the N-terminus and/or the C-terminus of an illustrative binary peptide disclosed above, wherein the two amino acid sequence is GS, WN, WQ, MA or MV.

[0274] In some embodiments, the spacer portion of the tertiary peptide (Z region) comprises the amino acid sequence GS, which may be fused in frame to the N-terminus or C-terminus of the binary peptide or both.

[0275] In various embodiments, exemplary binary peptides for use in the insecticidal and/or nematicidal polypeptides and proteins, DNA constructs and polynucleotides encoding an insecticidal and/or nematicidal polypeptide and protein and incorporated into a transgenic plants or part thereof, of the present invention, may include one or more cleavable tertiary peptides selected from the group of or consisting of: a binary peptide selected from IFVRLR (SEQ ID NO: 1619), ALKLFV (SEQ ID NO: 1605), ALKFLV (SEQ ID NO: 1603), RRKAFV (SEQ ID NO: 1644), or LFAAPF (SEQ ID NO: 1621), fused in frame either on the N-terminus, C-terminus or both termini with a Z region or spacer sequence selected from the group of or consisting of GS, WN, WQ, MA, MV, AM, LH, MN, ES, WQ, or DT. In embodiments related to the above, the insecticidal and/or nematicidal protein may contain TPs that are the same or different, and the binary or tertiary peptides may be the same or different. In related embodiments of the above, tertiary peptides (designated above as L), may include the amino acid sequence of a binary peptide selected from IFVRLR (SEQ ID NO: 1619), ALKLFV (SEQ ID NO: 1605), ALKFLV (SEQ ID NO: 1603), RRKAFV (SEQ ID NO: 1644), or LFAAPF (SEQ ID NO: 1621), fused in frame either on the N-terminus, C-terminus or both termini of the binary peptide with a Z region or spacer sequence selected from the group of or consisting of GS, WN, WQ, MA, MV, AM, LH, MN, ES, WQ, or DT. See FIG. 4. In related embodiments of the above, TPs useful in the manufacture of an insecticidal and/or nematicidal protein, which may include one or more ICK TPs, for example, a TP selected from an “ACTX” or “ACTX peptide” family of insecticidal ICK peptides that have been isolated from an Australian funnel-web spiders belonging to the Atracinae subfamily, for example, one or more TPs selected from an Omega-ACTX TP, a Kappa-ACTX TP and an U-ACTX TP, for example, U+2-ACTX-Hv1a, U-ACTX-Hv1a, rU-ACTX-Hv1a, rU-ACTX-Hv1b (wherein the TPs, if more than one, may be the same or different) and each insecticidal and/or nematicidal protein further comprising one or more tertiary peptides (designated above as L), which may include the amino acid sequence of a binary peptide selected from IFVRLR (SEQ ID NO: 1619), ALKLFV (SEQ ID NO: 1605), ALKFLV (SEQ ID NO: 1603), RRKAFV (SEQ ID NO: 1644), or LFAAPF (SEQ ID NO: 1621), fused in frame either on the N-terminus, C-terminus or both termini of the binary peptide with a Z region or spacer sequence selected from the group of or consisting of GS, WN, WQ, MA, MV, AM, LH, MN, ES, WQ, or DT.

[0276] In various embodiments, an exemplary insecticidal and/or nematicidal protein can include: (ERSP)-(L)-TP-(L)-TP, (ERSP)-(L)-TP-(L)-TP-(L), (L-TP)ₙ-L, (L-TP-L)ₙ, (ERSP)-(TP-L)ₙ, (ERSP)-(L)-(TP-L)ₙ, (ERSP)-(L-TP)ₙ, (ERSP)-(L-TP)ₙ-(L), (ERSP)-(STA)-(L-TP)ₙ, (ERSP)-(STA)-(L-TP)ₙ-(L), (ERSP)-(STA)-(TP-L)ₙ, or (ERSP)-(STA)-(L)-(TP-L)ₙ, or (STA)-(L-TP)ₙ, or (STA)-(L-TP)ₙ-(L), or (STA)-(TP-L)ₙ, or (STA)-(L)-(TP-L)ₙ, wherein (L) is a binary peptide or a tertiary peptide, and which each L may be the same or different, TP is a toxic peptide, which may be the same or different, and n is an integer ranging from 1 to 200, preferably 1 to 100, and most preferably, 1 to 10 (See for example exemplary insecticidal and/or nematicidal proteins as shown in FIG. 4, wherein n is an integer ranging from 1 to 200, preferably 1 to 100, and most preferably, 1 to 10). In related embodiments, the insecticidal and/or nematicidal protein may contain TPs that are the same or different, and binary and/or tertiary peptides that are the same or different. In related embodiments of the above, tertiary peptides (designated above as L), may include the amino acid sequence of a binary peptide selected from IFVRLR (SEQ ID NO: 1619), ALKLFV (SEQ ID NO: 1605), ALKFLV (SEQ ID NO: 1603), RRKAFV (SEQ ID NO: 1644), or LFAAPF (SEQ ID NO: 1621), fused in frame either on the N-terminus, C-terminus or both termini of the binary peptide with a Z region or spacer sequence selected from the group of or consisting of GS, WN, WQ, MA, MV, AM, LH, MN, ES, WQ, or DT. In another embodiment, a plant, or part thereof comprises a polynucleotide operably linked to an operable promoter, for example, a homologous or heterologous promoter, wherein the polynucleotide encodes an insecticidal and/or nematicidal protein comprising an ERSP fused in frame with the N-terminus of a stabilizing domain (STA). See FIGS. 5 and 6C.

[0277] The STA can be fused in frame with either the N-terminus of a binary or tertiary peptide, or the N-terminus of a construct comprising: (L-TP)ₙ, (L-TP)ₙ-L, (TP-L)ₙ, or L-(TP-L)ₙ.

[0278] In various embodiments, an exemplary insecticidal and/or nematicidal protein, and/or the DNA construct comprising one or more polynucleotides each or in combination encoding such insecticidal and/or nematicidal proteins can include the construct: (ERSP)-(STA)-(L-TP)ₙ, or (ERSP)-(STA)-(L-TP)ₙ-(L), or (ERSP)-(STA)-(TP-L)ₙ, or (ERSP)-(STA)-(L)-(TP-L)ₙ, or (STA)-(L-TP)ₙ, or (STA)-(L-TP)ₙ-(L), or (STA)-(TP-L)ₙ, or (STA)-(L)-(TP-L)ₙ, wherein TP is toxic protein, L is a binary or tertiary peptide and n is an integer ranging from 1 to 200, preferably an integer ranging from 1 to 100, and more preferably an integer ranging from 1 to 10. In some embodiments, the insecticidal and/or nematicidal protein may contain TPs that are the same or different, and binary and/or tertiary peptides may be the same or different. In some embodiments, the insecticidal and/or nematicidal protein has the C-terminal TP fused with or unfused at its C-terminus with a binary or tertiary peptide. In related embodiments of the above, TPs useful in the manufacture of a DNA construct or polynucleotide encoding: (1) an insecticidal and/or nematicidal protein, which may include one or more ICK TPs, for example, a TP selected from an “ACTX” or “ACTX peptide” family of insecticidal ICK peptides that have been isolated from an Australian funnel-web spiders belonging to the Atracinae subfamily, for example, one or more TPs selected from an Omega-ACTX TP, a Kappa-ACTX TP and an U-ACTX TP, for example, U+2-ACTX-Hv1a, U-ACTX-Hv1a, rU-ACTX-Hv1a, rU-ACTX-Hv1b, or a TP having at least 80%, at least 85%, at least 90%, at least 95%, at least 96%, at least 97%, at least 98%, at least 99%, or at least 100% sequence identity or sequence homology to a peptide or protein having an amino acid sequence as set forth in SEQ ID NOs: 5, 6 and 1761, 1762, 1767, 1771-1773, and variants thereof, (wherein the TPs, if more than one, may be the same or different) and each insecticidal and/or nematicidal protein further comprising one or more tertiary peptides (designated above as L), which may include the amino acid sequence of a binary peptide selected from IFVRLR (SEQ ID NO: 1619), ALKLFV (SEQ ID NO: 1605), ALKFLV (SEQ ID NO: 1603), RRKAFV (SEQ ID NO: 1644), or LFAAPF (SEQ ID NO: 1621), fused in frame either on the N-terminus, C-terminus or both termini of the binary peptide with a Z region or spacer sequence selected from the group of or consisting of GS, WN, WQ, MA, MV, AM, LH, MN, ES, WQ, or DT.

[0279] DNA constructs encoding a cleavable linking peptide operatively fused to a TP can be constructed with a variety of host cell specific regulatory components. In some embodiments, the DNA constructs may be transformed into a variety of host cells for expression, synthesis of encoded proteins or for genetic manipulation. In some embodiments, the host cell can be a bacterial cell, a yeast cell, a plant cell, or an animal cell, for example, an Agrobacterium cell, a Bacillus cell, an Escherichia cell, a Salmonella cell, a Pseudomonas cell, and a Rhizobium cell. In various embodiments, the host cell is a plant cell.

[0280] In some embodiments, the insecticidal and/or nematicidal compositions comprising cleavable linking peptides described herein are intended for the dissemination of TPs into insect and/or nematode pests that ingest or otherwise come into contact with the insecticidal and/or nematicidal compositions. The present invention provides a plant, or part thereof, (a “plant or part thereof”, is defined herein as including, without limitation, a plant and the plant's tissue (for example, a plant's roots, stem, leaves, flowers or parts thereof), a plant cell, or a plant seed of said plant) comprising: an insecticidal and/or nematicidal protein or polypeptide comprising either a binary or a tertiary peptide, the binary and/or the tertiary peptide containing at least 4 amino acids and up to a maximum of 16 amino acids, and is comprised of 2 or 3 different regions, wherein the binary peptide has 2 different regions and the tertiary peptide has 3 different regions; wherein, the binary and/or the tertiary peptide can be cleaved by both an animal gut protease and an insect or nematode gut protease, and in some embodiments, the binary and/or the tertiary peptide is operably fused to the C-terminus of an Endoplasmic Reticulum Signal Peptide (ERSP) and operably fused to the N-terminus of a TP.

[0281] In some embodiments, the insecticidal and/or nematicidal compositions comprising cleavable linking peptides described herein are intended for the dissemination or consumption of TPs into or by insect and/or nematode pests that ingest or otherwise come into contact with the insecticidal and/or nematicidal compositions. The present invention provides a plant, or part thereof, (a “plant or part thereof”, is defined herein as including, without limitation, a plant and the plant tissue, a plant cell, or a plant seed of said plant) comprising an insecticidal and/or nematicidal protein or polypeptide comprising one or more binary and/or tertiary peptides, the binary and/or the tertiary peptide containing at least 4 amino acids and up to a maximum of 16 amino acids, and is comprised of 2 or 3 different regions, wherein the binary peptide has 2 different regions and the tertiary peptide has 3 different regions; wherein, the binary and/or the tertiary peptide can be cleaved by both an animal gut protease, (for example a human gut protease) and an insect or nematode gut protease, and in some embodiments, the binary and/or the tertiary peptide is operably fused to the C-terminus of an Endoplasmic Reticulum Signal Peptide (ERSP) and operably fused to the N-terminus of a TP. In some of these embodiments, exemplary tertiary peptides (designated as L), may include the amino acid sequence of a binary peptide selected from IFVRLR (SEQ ID NO: 1619), ALKLFV (SEQ ID NO: 1605), ALKFLV (SEQ ID NO: 1603), RRKAFV (SEQ ID NO: 1644), or LFAAPF (SEQ ID NO: 1621), fused in frame either on the N-terminus, C-terminus or both termini of the binary peptide with a Z region or spacer sequence selected from the group of or consisting of GS, WN, WQ, MA, MV, AM, LH, MN, ES, WQ, or DT.

[0282] In some embodiments, the insecticidal and/or nematicidal compositions comprising cleavable linking peptides described herein are intended for the dissemination or consumption of TPs into or by insect and/or nematode pests that ingest or otherwise come into contact with the insecticidal and/or nematicidal compositions. The present invention provides a plant, or part thereof, (a “plant or part thereof”, is defined herein as including, without limitation, a plant and the plant tissue, a plant cell, or a plant seed of said plant) comprising an insecticidal and/or nematicidal protein or polypeptide comprising either a binary or a tertiary peptide, the binary and/or the tertiary peptide containing at least 4 amino acids and up to a maximum of 16 amino acids, and is comprised of 2 or 3 different regions, wherein the binary peptide has 2 different regions and the tertiary peptide has 3 different regions; wherein, the binary and/or the tertiary peptide can be cleaved by both an animal gut protease and an insect or nematode gut protease, and in some embodiments, the binary and/or the tertiary peptide is operably fused to the C-terminus of an Endoplasmic Reticulum Signal Peptide (ERSP) and operably fused to the N-terminus of a TP.

[0283] In a related embodiment, the plant or part thereof, comprises a polynucleotide that encodes an insecticidal and/or nematicidal protein, wherein the insecticidal and/or nematicidal protein comprises an ERSP fused in frame with the N-terminus of a binary or tertiary peptide, the binary or tertiary peptide is fused in frame with a construct comprising (TP-L)ₙ or the insecticidal and/or nematicidal protein comprises an ERSP fused in frame with a binary peptide and/or a repeat construct (L-TP)ₙ or (TP-L)ₙ. See FIG. 4. In various embodiments, the exemplary insecticidal and/or nematicidal protein can include a construct from N-terminus to C-terminus: (ERSP)-(L)-TP-(L)-TP, (ERSP)-(L)-TP-(L)-TP-(L), (L-TP)ₙ-L, (L-TP-L)ₙ, (ERSP)-(TP-L)ₙ, (ERSP)-(L)-(TP-L)ₙ, (ERSP)-(L-TP)ₙ, (ERSP)-(L-TP)ₙ-(L), (ERSP)-(STA)-(L-TP)ₙ, (ERSP)-(STA)-(L-TP)ₙ-(L), (ERSP)-(STA)-(TP-L)ₙ, or (ERSP)-(STA)-(L)-(TP-L)ₙ, or (STA)-(L-TP)ₙ, or (STA)-(L-TP)ₙ-(L), or (STA)-(TP-L)ₙ, or (STA)-(L)-(TP-L)ₙ, wherein (L) is a binary peptide or a tertiary peptide, and which each L may be the same or different, TP is a toxic peptide, which may be the same or different, and n is an integer ranging from 1 to 200, preferably 1 to 100, and most preferably, 1 to 10. In some of these embodiments, exemplary tertiary peptides (designated as L), may include the amino acid sequence of a binary peptide selected from IFVRLR (SEQ ID NO: 1619), ALKLFV (SEQ ID NO: 1605), ALKFLV (SEQ ID NO: 1603), RRKAFV (SEQ ID NO: 1644), or LFAAPF (SEQ ID NO: 1621), fused in frame either on the N-terminus, C-terminus or both termini of the binary peptide with a Z region or spacer sequence selected from the group of or consisting of GS, WN, WQ, MA, MV, AM, LH, MN, ES, WQ, or DT. In related embodiments of the above, TPs useful in the manufacture of a DNA construct or polynucleotide encoding: (1) an insecticidal and/or nematicidal protein, which may include one or more ICK TPs, for example, a TP selected from an “ACTX” or “ACTX peptide” family of insecticidal ICK peptides that have been isolated from an Australian funnel-web spiders belonging to the Atracinae subfamily, for example, one or more TPs selected from an Omega-ACTX TP, a Kappa-ACTX TP and an U-ACTX TP, for example, U+2-ACTX-Hv1a, U-ACTX-Hv1a, rU-ACTX-Hv1a, rU-ACTX-Hv1b or a TP having at least 80%, at least 85%, at least 90%, at least 95%, at least 96%, at least 97%, at least 98%, at least 99%, or at least 100% sequence identity or sequence homology to a peptide or protein having an amino acid sequence as set forth in SEQ ID NOs: 5, 6 and 1761, 1762, 1767, 1771-1773, and variants thereof, (wherein the TPs, if more than one, may be the same or different) and each insecticidal and/or nematicidal protein further comprising one or more tertiary peptides (designated above as L), which may include the amino acid sequence of a binary peptide selected from IFVRLR (SEQ ID NO: 1619), ALKLFV (SEQ ID NO: 1605), ALKFLV (SEQ ID NO: 1603), RRKAFV (SEQ ID NO: 1644), or LFAAPF (SEQ ID NO: 1621), fused in frame either on the N-terminus, C-terminus or both termini of the binary peptide with a Z region or spacer sequence selected from the group of or consisting of GS, WN, WQ, MA, MV, AM, LH, MN, ES, WQ, or DT.

[0284] In another embodiment, a plant, or part thereof comprises a polynucleotide operably linked to an operable promoter, for example, a homologous or heterologous promoter, wherein the polynucleotide encodes an insecticidal and/or nematicidal protein comprising an ERSP fused in frame with the N-terminus of a stabilizing domain (STA). See FIG. 5. The STA is fused in frame with either the N-terminus of a binary or tertiary peptide, or the N-terminus of a construct comprising: (L-TP)ₙ, (L-TP)ₙ-L, (TP-L)ₙ, or L-(TP-L)ₙ. In various embodiments, the exemplary insecticidal and/or nematicidal protein can include: (ERSP)-(STA)-(L-TP)ₙ, or (ERSP)-(STA)-(L-TP)ₙ-(L), or (ERSP)-(STA)-(TP-L)ₙ, or (ERSP)-(STA)-(L)-(TP-L)ₙ, or (STA)-(L-TP)ₙ, or (STA)-(L-TP)ₙ-(L), or (STA)-(TP-L)ₙ, or (STA)-(L)-(TP-L)ₙ, wherein TP is toxic protein as described herein, L is a binary or tertiary peptide and n is an integer ranging from 1 to 200, preferably an integer ranging from 1 to 100, and more preferably an integer ranging from 1 to 10. In some embodiments, the insecticidal and/or nematicidal protein having a construct as shown above may contain TPs that are the same or different, and binary and/or tertiary peptides that are the same or different. In some eof these embodiments, the insecticidal and/or nematicidal protein having a construct as shown above may contain a TP having at least 80%, at least 85%, at least 90%, at least 95%, at least 96%, at least 97%, at least 98%, at least 99%, or at least 100% sequence identity or sequence homology to a peptide or protein having an amino acid sequence as set forth in SEQ ID NOs: 5, 6 and 1761, 1762, 1767, 1771-1773, and variants thereof, (wherein the TPs, if more than one, may be the same or different) and each insecticidal and/or nematicidal protein further comprising one or more tertiary peptides (designated above as L), which may include the amino acid sequence of a binary peptide selected from IFVRLR (SEQ ID NO: 1619), ALKLFV (SEQ ID NO: 1605), ALKFLV (SEQ ID NO: 1603), RRKAFV (SEQ ID NO: 1644), or LFAAPF (SEQ ID NO: 1621), fused in frame either on the N-terminus, C-terminus or both termini of the binary peptide with a Z region or spacer sequence selected from the group of or consisting of GS, WN, WQ, MA, MV, AM, LH, MN, ES, WQ, or DT.

[0285] In some embodiments, the C-terminal TP is fused or unfused at its C-terminus with a binary or tertiary peptide. See FIGS. 2, 4 and 5. In some of these embodiments, exemplary tertiary peptides (designated as L), may include the amino acid sequence of a binary peptide selected from IFVRLR (SEQ ID NO: 1619), ALKLFV (SEQ ID NO: 1605), ALKFLV (SEQ ID NO: 1603), RRKAFV (SEQ ID NO: 1644), or LFAAPF (SEQ ID NO: 1621), fused in frame either on the N-terminus, C-terminus or both termini of the binary peptide with a Z region or spacer sequence selected from the group of or consisting of GS, WN, WQ, MA, MV, AM, LH, MN, ES, WQ, or DT.

[0286] It should be appreciated by the reader that in practice a TP-Linker construct (the Linker being defined as including a cleavable binary or tertiary peptide) that can be written as (TP-L)ₙ, or the variations shown in FIG. 2 could also be written out in long form. For example, when n is 5 then (TP-L)ₙ written out in long form would appear as: TP-L-TP-L-TP-L-TP-L-TP-L. After a construct like this is made and produced in a system such as a plant, or part thereof, the L or Linkers will be split apart by insect and/or nematode proteases in the gut or hemolymph environment of the insect and/or nematode to allow large numbers single toxic peptides to be released and exert their toxic effects, killing or immobilizing or slowing the feeding of the insects and/or nematodes. When this happens, depending on various circumstances, the L or Linker can be cleaved between different amino acids in the linker or between the Toxic Peptide and the linker such that on either side of the TP or Toxic Peptide there can be from 0 to 16 amino acids still attached to the toxic peptide remaining from the L or Linker that had an initial length of from 1-16 amino acids to start with. Said another way, post protease cleavage, the TP could either have no amino acids from the Linker attached to it, or it could have one or two “stubs” aka “nubbins” (one or both stubs fused to the N-terminus and/or the C-terminus) made of remnants of the Linker, that vary in size from one to 16 amino acids, but more often from 2, 3, 4, 5, 6, 7, 8, 9, 10, 11, 12, 13 or 14 amino acids. The stubs can be on the N-terminal, the C-terminal, or both the N-terminal and the C-terminals. These stubs are not always the same size, it depends on how they are cleaved by the proteases in the insect and/or human gut environment and this can vary depending on the protease and the Linker used. Normally there will be stubs attached to both “sides” of the Toxic Peptides with both stubs originating from different parts of the Linking Peptide. Sometimes there are no stubs or only 1 stub attached to the TP after cleavage.

[0287] The stubs can range in size from 1-16 amino acids, (and there may be no stubs) depending on the length of the starting Linker, more often the stubs will be from 2-14 amino acids, from 3-12, from 4-8, or from 5-7 amino acids or but they could be any of the following lengths of amino acids: from: 1-3, 1-4, 1-5, 1-6, 1-7, 1-8, 1-9, 10, 1-11, 2-3, 2-4, 2-5, 2-6, 2-7, 2-8, 2-9, 2-10, and 2-11, or 3-4, 3-5, 3-6, 3-7, 3-8, 3-9, 3-10, and 3-11, or 4-5, 4-6, 4-7, 4-8, 4-9, 4-10 and 4-11; or 5-6, 5-7, 5-8, 5-9, 5-10 and 5-11; or 6-7, 6-8, 6-9, 6-10 and 6-11; or 7-8, 7-9, 7-10, and 7-11; and 8-9, 8-10, or 8-11, and 9-10 or 9-11, or 10 or 11 amino acids in length.

[0288] Thus, when, before cleavage, the construct might appear as TP-L-TP-L-TP-L-TP-L-TP-L, (our example above, and shown in equation form in FIG. 2) where, for example, if the Linker has 6 aa (or amino acids), then after protease cleavage, the TP-L-TP-L-TP-L-TP-L-TP-L construct is broken up into individual Toxic Peptides (TPs) with stubs, which might appear as follows: the first peptide could be TP-2aa (2aa from one side of the 6 aa Linker) and then 4aa from the last part of the Linker attached to the other end of the toxic peptide as in: 4aa-TP-2aa, and a third peptide 4aa-TP-2aa, and a fourth 4aa-TP-2aa and then the fifth and last cleaved TP would appear as 4aa-TP-6aa, because the last Linker may not be cleaved. Sometimes cleavage does not always take place because the last TP of the construct is not attached to another TP. Or it might be cleaved leaving a 4aa-TP-2aa. These bits of aa fragments attached to the toxic peptides following peptidase cleavage are what we call “stubs” and they do not typically affect or inhibit the activity of the cleaved toxic peptides produced from cleavage in the insects' gut.

[0289] Stubs may also appear when an ERSP is fused to the (TP-L)ₙ or (L-TP)ₙ as in FIG. 4 and in such a construct the stub could include pieces of the ERSP, and or in FIG. 5 where the L-TP is further fused to a STA or BAAS, or Ubiquitin, whatever is used in the construct. The stubs could be any combination of any length of peptide of 1 amino acid or greater up to 16 amino acids in length. They may be irregularly attached to the TP. Stubs may not have the same length or number of amino acids before and after the Toxic Peptide.

[0290] In various embodiments, a host cell is provided that has been transformed with a DNA construct described herein that is operable to express an insecticidal and/or nematicidal protein of the present invention. In various embodiments, the host cell may be a eukaryotic cell, for example, a yeast cell, for example, a yeast cell from the genus Saccharomyces, Pichia, Hansenula, Kluyveromyces, Schizosaccharomyces, Schwanniomyces, Yarrowia, Aspergillus; plant cells; and mammalian cells.

[0291] In various embodiments, the intended host cell that is transformed (transiently, or stably) with the DNA constructs encoding an insecticidal and/or nematicidal protein comprising a cleavable linking peptide operatively fused to a TP are plant cells. In some embodiments, the plant cells that may be transformed with the DNA constructs described herein may include but not limited to: alfalfa, banana, barley, bean, broccoli, cabbage, canola, carrot, cassava, castor, cauliflower, celery, chickpea, Chinese cabbage, citrus, coconut, coffee, corn, clover, cotton, a cucurbit, cucumber, Douglas fir, eggplant, eucalyptus, flax, garlic, grape, hops, leek, lettuce, Loblolly pine, millets, melons, nut, oat, olive, onion, ornamental, palm, pasture grass, pea, peanut, pepper, pigeon pea, pine, potato, poplar, pumpkin, Radiata pine, radish, rapeseed, rice, rootstocks, rye, safflower, shrub, sorghum, Southern pine, soybean, spinach, squash, strawberry, sugar beet, sugarcane, sunflower, sweet corn, sweet gum, sweet potato, switchgrass, tea, tobacco, tomato, triticale, turf grass, watermelon, and a wheat plant cell.

[0292] The present invention provides insecticidal and/or nematicidal proteins, such that when the insecticidal and/or nematicidal protein is ingested by an insect and/or a nematode, the gut environment proteases of the insect and/or nematode cleaves the binary and/or tertiary peptide thereby liberating the fused TPs and is killed, immobilized, rendered unable to function normally or slowing the feeding or growth of the insects and/or nematodes contacted with the insecticidal and/or nematicidal protein. In certain embodiments, the selection of TPs to be incorporated into the insecticidal and/or nematicidal protein can be made to target a specific insect or nematode pest, or for expression in a specific plant or specific conditions experienced by the plant. In some embodiments, an insecticidal and/or nematicidal protein which is produced by a transgenic plant, plant tissue, or plant seed or a composition comprising one or more insecticidal and/or nematicidal proteins having the same or different TPs formulated for direct application to a plant, has TPs comprised of a combination of ICK TPs and Bt TPs. The transgenic plant, plant tissue, or plant seed can express an insecticidal protein, or one or more plynucleotides encoding an insecticidal protein comprising one or more ICK TPs derived from any species of Australian Funnel-web spider, or the Australian Funnel-web spiders of genus Atrax or Hadronyche, and the Australian Blue Mountains Funnel-web, Hadronyche versuta. In some embodiments, the present invention provides a transgenic plant, or part thereof, (for example, a plant tissue, a plant cell, or a plant seed) wherein the transgenic plant or part thereof contains an insecticidal protein comprising a construct (from N-terminal to C-terminal) (ERSP)-(L)-TP-(L)-TP, (ERSP)-(L)-TP-(L)-TP-(L), (L-TP)ₙ-L, (L-TP-L)ₙ, (ERSP)-(TP-L)ₙ, (ERSP)-(L)-(TP-L)ₙ, (ERSP)-(L-TP)ₙ, (ERSP)-(L-TP)ₙ-(L), (ERSP)-(STA)-(L-TP)ₙ, (ERSP)-(STA)-(L-TP)ₙ-(L), (ERSP)-(STA)-(TP-L)ₙ, or (ERSP)-(STA)-(L)-(TP-L)ₙ, or (STA)-(L-TP)ₙ, or (STA)-(L-TP)ₙ-(L), or (STA)-(TP-L)ₙ, or (STA)-(L)-(TP-L)ₙ, wherein (L) is a binary peptide or a tertiary peptide, and which each L may be the same or different, TP is a toxic peptide, which may be the same or different, and n is an integer ranging from 1 to 200, preferably 1 to 100, and most preferably, 1 to 10.

[0293] In related embodiments, the transgenic plant or part thereof may express an insecticidal and/or nematicidal protein that may contain TPs that are the same or different, and binary and/or tertiary peptides that are the same or different. In related embodiments, the transgenic plant, or part thereof, (for example, a plant tissue, a plant cell, or a plant seed) contains one or more polynucleotides each or in combination, operable to express an insecticidal protein comprising a construct, comprising, selected from the group consisting of, or consisting of: (from N-terminal to C-terminal) (ERSP)-(L)-TP-(L)-TP, (ERSP)-(L)-TP-(L)-TP-(L), (L-TP)ₙ-L, (L-TP-L)ₙ, (ERSP)-(TP-L)ₙ, (ERSP)-(L)-(TP-L)ₙ, (ERSP)-(L-TP)ₙ, (ERSP)-(L-TP)ₙ-(L), (ERSP)-(STA)-(L-TP)ₙ, (ERSP)-(STA)-(L-TP)ₙ-(L), (ERSP)-(STA)-(TP-L)ₙ, (ERSP)-(STA)-(L)-(TP-L)ₙ, (STA)-(L-TP)ₙ, (STA)-(L-TP)ₙ-(L), (STA)-(TP-L)ₙ, (STA)-(L)-(TP-L)ₙ, wherein (L) is a binary peptide or a tertiary peptide, and which each L may be the same or different, TP is a toxic peptide, which may be the same or different, and n is an integer ranging from 1 to 200, preferably 1 to 100, and most preferably, 1 to 10. In related embodiments of the above, TPs useful in the manufacture of a transgenic plant or part thereof, comprising a DNA construct or polynucleotide encoding: (1) an insecticidal and/or nematicidal protein, which may include one or more ICK TPs, for example, a TP selected from an “ACTX” or “ACTX peptide” family of insecticidal ICK peptides that have been isolated from an Australian funnel-web spiders belonging to the Atracinae subfamily, for example, one or more TPs selected from an Omega-ACTX TP, a Kappa-ACTX TP and an U-ACTX TP, for example, U+2-ACTX-Hv1a, U-ACTX-Hv1a, rU-ACTX-Hv1a, rU-ACTX-Hv1b or one or more TPs having at least 80%, at least 85%, at least 90%, at least 95%, at least 96%, at least 97%, at least 98%, at least 99%, or at least 100% sequence identity or sequence homology to a peptide or protein having an amino acid sequence as set forth in SEQ ID NOs: 5, 6 and 1761, 1762, 1767, 1771-1773, and variants thereof, (wherein the TPs, if more than one, may be the same or different) and each insecticidal and/or nematicidal protein further comprising one or more tertiary peptides (designated above as L), which may include the amino acid sequence of a binary peptide selected from IFVRLR (SEQ ID NO: 1619), ALKLFV (SEQ ID NO: 1605), ALKFLV (SEQ ID NO: 1603), RRKAFV (SEQ ID NO: 1644), or LFAAPF (SEQ ID NO: 1621), fused in frame either on the N-terminus, C-terminus or both termini of the binary peptide with a Z region or spacer sequence selected from the group of or consisting of GS, WN, WQ, MA, MV, AM, LH, MN, ES, WQ, or DT.

[0294] In related embodiments, the one or more polynucleotides are provided in an expression vector, operable to express an insecticidal and/or nematicidal protein as described above and herein, and is under the control of a constitutive or inducible promoter, wherein the expression vector is transiently expressed in a host cell, for example, a plant cell, or wherein the polynucleotide operable to encode the insecticidal protein is stably integrated into the plant's, or part thereof nuclear DNA. In related embodiments of the above, TPs useful in the manufacture of a DNA construct or polynucleotide encoding: (1) an insecticidal and/or nematicidal protein, which may include one or more ICK TPs, for example, a TP selected from an “ACTX” or “ACTX peptide” family of insecticidal ICK peptides that have been isolated from an Australian funnel-web spiders belonging to the Atracinae subfamily, for example, one or more TPs selected from an Omega-ACTX TP, a Kappa-ACTX TP and an U-ACTX TP, for example, U+2-ACTX-Hv1a, U-ACTX-Hv1a, rU-ACTX-Hv1a, rU-ACTX-Hv1b (wherein the TPs, if more than one, may be the same or different) and each insecticidal and/or nematicidal protein further comprising one or more tertiary peptides (designated above as L), which may include the amino acid sequence of a binary peptide selected from IFVRLR (SEQ ID NO: 1619), ALKLFV (SEQ ID NO: 1605), ALKFLV (SEQ ID NO: 1603), RRKAFV (SEQ ID NO: 1644), or LFAAPF (SEQ ID NO: 1621), fused in frame either on the N-terminus, C-terminus or both termini of the binary peptide with a Z region or spacer sequence selected from the group of or consisting of GS, WN, WQ, MA, MV, AM, LH, MN, ES, WQ, or DT.

[0295] In some embodiments, methods for controlling an insect and/or nematode pest may include applying a formulation comprising an insecticidal and/or nematicidal protein comprising a combination of a Bt (Bacillus thuringiensis) TP and an ICK (Inhibitor Cystine Knot) TP to said insect and/or nematode. Upon release of at least 50% of the TPs from the insecticidal and/or nematicidal protein, the ratio of Bt TP to ICK TP, on a dry weight basis thus released, can be selected from at least about the following ratios: 99:1, 95:5, 90:10, 85:15, 80:20, 75:25, 70:30, 65:35, 60:40, 55:45, 50:50, 45:55, 40:60, 35:65, 30:70, 25:75, 20:80, 15:85, 10:90, 5:95 and 1:99, or any combination of any two of these values. The ratio of Bt TP to ICK TP, on a dry weight basis thus released, can be selected from about the following ratios: 50:50, 45:55, 40:60, 35:65, 30:70, 25:75, 20:80, 15:85, 10:90, 5:95, 1:99, 0.5:99.5, 0.1:99.9 and 0.01:99.99 or any combination of any two of these values. The formulation may comprise the insecticidal and/or nematicidal protein and appropriate excipients, or the insecticidal and/or nematicidal protein may be expressed by a culture of one or more bacterial strains, that when formulated and applied to the plant, the bacterial strains produce the insecticidal and/or nematicidal protein which is subsequently ingested by the insect and/or nematode pest. In various embodiments, the total concentration of Bt TP and ICK TP in the composition is selected from the following percent concentrations: 1, 5, 10, 15, 20, 25, 30, 35, 40, 45, 50, 55, 60, 65, 70, 75, 80, 85, 90, 95 or 99%, or any range between any two of these values, and the remaining percentage of the composition is comprised of excipients. Any of the insecticidal and/or nematicidal proteins and plants described herein can be used to control insects and/or nematodes, their growth and damage, especially their damage to plants. In some embodiments, insecticidal and/or nematicidal proteins comprising the combination of Bt TP and ICK TP can be applied by being sprayed on a plant, or the insect's locus, or the locus of a plant in need of protecting.

[0296] In some embodiments, illustrative methods for controlling a pest infection comprises preparing a formulation comprising: an insecticidal and/or nematicidal protein comprising a combination of a Bt TP; and an ICK TP, which can include any of the compositions described herein or capable of being made by one skilled in the art given this disclosure. Some of the described formulations include the use of a polar aprotic solvent, and or water, and or where the polar aprotic solvent is present in an amount of 1-99 wt %, the polar protic solvent is present in an amount of 1-99 wt %, and the water is present in an amount of 0-98 wt %. The formulations include formulations where the Bt TP is Dipel and where the ICK TP is a hybrid-ACTX-Hv1a peptide, or a TP having at least 80%, at least 85%, at least 90%, at least 95%, at least 96%, at least 97%, at least 98%, at least 99%, or at least 100% sequence identity or sequence homology to a peptide or protein having an amino acid sequence as set forth in SEQ ID NOs: 5, 6 and 1761, 1762, 1767, 1771-1773, and variants thereof, (wherein the TPs, if more than one, may be the same or different).

[0297] The polar aprotic solvent formulations are especially effective when they contain MSO. The examples below are intended to illustrate and not limit the invention in any manner.

[0298] In some embodiments, an insecticidal and/or nematicidal proteins which are produced by a transgenic plant, or part thereof or formulated for direct application to a plant, comprises a combination of a Bt TP and a TMOF TP, that when combined in a single insecticidal and/or nematicidal protein, may inhibit the growth, impair the movement, or even kill an insect when the combination of TPs is appropriately delivered to the locus inhabited by the insect. The spray-dried powders are can be made using as the primary active agent an insecticidal and/or nematicidal protein as described herein comprising a combination of TPs as discussed above, and one or more various excipients and fermentation by-products.

[0299] We describe an insecticidal and/or nematicidal protein composition comprising both a Bt (Bacillus thuringiensis) protein; and a TMOF TP. In some embodiments, methods for controlling an insect and/or nematode pest may include applying a formulation comprising an insecticidal and/or nematicidal protein comprising a combination of a Bt (Bacillus thuringiensis) TP and a TMOF TP to said insect and/or nematode. Upon release of at least 50% of the TPs from the insecticidal and/or nematicidal protein, the ratio of Bt TP to TMOF TP, on a dry weight basis thus released, can be selected from about any or all of the following ratios: 99:1, 95:5, 90:10, 85:15, 80:20, 75:25, 70:30, 65:35, 60:40, 55:45, 50:50, 45:55, 40:60, 35:65, 30:70, 25:75, 20:80, 15:85, 10:90, 5:95 and 1:99, or any combination of any two of these values. The formulation may comprise the insecticidal and/or nematicidal protein and appropriate excipients, or the insecticidal and/or nematicidal protein may be expressed by a culture of one or more bacterial strains, that when formulated and applied to the plant, the bacterial strains produce the insecticidal and/or nematicidal protein which is subsequently ingested by the insect and/or nematode pest. In various embodiments, the total concentration of Bt TP and TMOF TP in the composition is selected from the following percent concentrations: 1, 5, 10, 15, 20, 25, 30, 35, 40, 45, 50, 55, 60, 65, 70, 75, 80, 85, 90, 95 or 99%, or any range between any two of these values, and the remaining percentage of the composition is comprised of excipients. Any of the insecticidal and/or nematicidal proteins and plants described herein can be used to control insects and/or nematodes, their growth and damage, especially their damage to plants. In some embodiments, insecticidal and/or nematicidal proteins comprising the combination of Bt TP and TMOF TP can be applied by being sprayed on a plant, or the insect's locus, or the locus of a plant in need of protecting.

[0300] In some embodiments, illustrative methods for controlling a pest infection comprises preparing a formulation comprising: an insecticidal and/or nematicidal protein comprising a combination of a Bt TP; and a TMOF TP, which can include any of the compositions described herein or capable of being made by one skilled in the art given this disclosure. Some of the described formulations include the use of a polar aprotic solvent, and or water, and or where the polar aprotic solvent is present in an amount of 1-99 wt %, the polar protic solvent is present in an amount of 1-99 wt %, and the water is present in an amount of 0-98 wt %. In certain embodiments, as provided herein, the insecticidal and/or nematicidal protein for any combination of TPs can include one or more binary and/or tertiary peptides. The insecticidal and/or nematicidal protein can include one or more TPs from the illustrative combination linked to a tertiary peptide, in which the spacer is positioned either to the N-terminal side of the binary peptide portion of the tertiary peptide or to the C-terminal side of the binary peptide portion of the tertiary peptide. In some embodiments, the spacer is a dipeptide, for example, GS, which may be operably linked to the TMOF TP units within the insecticidal and/or nematicidal protein. In some embodiments, the spacer dipeptide is linked at the N-terminal of the TMOF TP; and wherein the spacer is comprised of one nonpolar amino acid on the N-terminal of the dipeptide and one polar amino acid on the C-terminal of the dipeptide, including embodiments where the dipeptide is glycine-serine, including embodiments where the TMOF TP includes embodiments where the TMOF TP is at least 50%, 55%, 60%, 65%, 70%, 75%, 80%, 85%, 90%, 95%, 96%, 97%, 98%, or 99% or greater sequence identity to any of the TMOF sequences disclosed herein, including embodiments where the Bt Protein is any Bt TP, including embodiments where the Bt TP is a Cry or Cyt protein, including embodiments where the Bt TP is selected from the group consisting of a Cry1, Cry3, TIC851, CryET70, Cry22, TIC901, TIC201, TIC407, TIC417, a binary insecticidal protein CryET80, and CryET76, a binary insecticidal protein TIC100 and TIC101, a combination of an insecticidal protein ET29 or ET37 with an insecticidal protein TIC810 or TIC812 and a binary insecticidal protein PS149B1, including embodiments where the Bt TP is selected from a Cry protein, a Cry1A protein or a Cry1F protein, including embodiments where the Bt TP is a combination Cry1F-Cry1A protein, including embodiments where the Bt TP comprises an amino acid sequence at least 90% identical to SEQ ID NO: 10, 12, 14, 26, 28, or 34 of U.S. Pat. No. 7,304,206, including embodiments where the Bt Endotoxin is Dipel, including embodiments where the Bt Protein is Thuricide.

[0301] In some embodiments, methods for controlling an insect and/or nematode pest may include applying a formulation comprising an insecticidal and/or nematicidal protein comprising a combination of a Bt (Bacillus thuringiensis) TP and a TMOF TP to said insect and/or nematode. Upon release of at least 50% of the TPs from the insecticidal and/or nematicidal protein, the ratio of Bt TP to TMOF TP, on a dry weight basis thus released, can be selected from at least about the following ratios: 99:1, 95:5, 90:10, 85:15, 80:20, 75:25, 70:30, 65:35, 60:40, 55:45, 50:50, 45:55, 40:60, 35:65, 30:70, 25:75, 20:80, 15:85, 10:90, 5:95 and 1:99, or any combination of any two of these values. The ratio of Bt TP to TMOF TP, on a dry weight basis thus released, can be selected from about the following ratios: 50:50, 45:55, 40:60, 35:65, 30:70, 25:75, 20:80, 15:85, 10:90, 5:95, 1:99, 0.5:99.5, 0.1:99.9 and 0.01:99.99 or any combination of any two of these values. The formulation may comprise the insecticidal and/or nematicidal protein and appropriate excipients, or the insecticidal and/or nematicidal protein may be expressed by a culture of one or more bacterial strains, that when formulated and applied to the plant, the bacterial strains produce the insecticidal and/or nematicidal protein which is subsequently ingested by the insect and/or nematode pest. In various embodiments, the total concentration of Bt TP and TMOF TP in the composition is selected from the following percent concentrations: 1, 5, 10, 15, 20, 25, 30, 35, 40, 45, 50, 55, 60, 65, 70, 75, 80, 85, 90, 95 or 99%, or any range between any two of these values, and the remaining percentage of the composition is comprised of excipients. Any of the insecticidal and/or nematicidal proteins and plants described herein can be used to control insects and/or nematodes, their growth and damage, especially their damage to plants. In some embodiments, insecticidal and/or nematicidal proteins comprising the combination of Bt TP and TMOF TP can be applied by being sprayed on a plant, or the insect's locus, or the locus of a plant in need of protecting.

[0302] In some embodiments, the method for controlling a pest infection includes providing a transformed plant expressing an insecticidal and/or nematicidal protein expressing the combination of Bt TP and TMOF TPs described herein where the average concentration of each of Bt and TMOF TPs as a percentage weight of the total amount of expressed TP in an average leaf of a transformed plant is about: 1, 5, 10, 15, 20, 25, 30, 35, 40, 45, 50, 55, 60, 65, 70, 75, 80, 85, 90, 95 or 99%, or any range between any two of these values.

[0303] In some embodiments, the insecticidal and/or nematicidal protein expressing the combination of Bt TP and TMOF TPs described herein is expressed in corn, soybean, cotton, rice, sorghum, switchgrass, sugarcane, alfalfa, potatoes or tomatoes. In some embodiments, the insecticidal and/or nematicidal protein is expressed in a transgenic seed having an insecticidal and/or nematicidal protein as described above.

[0304] In some embodiments, a transformed plant expressing properly folded combination of Bt TP and TMOF TPs described herein in the transformed plant and to cause the accumulation of the expressed and properly folded combination ofBt TP and TMOF TPs described herein in said plant and to cause an increase in the plant's yield or resistance to insect and/or nematode damage and they control insect and/or nematode pests in crops and natural or man-made forests. We describe transgenic plants made by any of the products and processes described herein.

[0305] (5). Transgenic Plants

[0306] Methods of the invention involve introducing a nucleotide or DNA construct into a host cell, for example, a plant. By “introducing” is intended to present to the plant the DNA construct in such a manner that the construct gains access to the interior of a cell of the plant. The methods of the invention do not require that a particular method for introducing a DNA construct to a plant is used, only that the DNA construct gains access to the interior of at least one cell of the plant. Methods for introducing DNA constructs into plants are known in the art including, but not limited to, stable transformation methods, transient transformation methods, and virus-mediated methods. Methods for transforming polynucleotides including cloning and expression vectors containing insecticidal proteins are known in the art. For example, methods for cloning and transforming plants by introducing recombinant insecticidal proteins fused to signal peptides and molecular markers can be found in International PCT Application Serial No. PCT/US2013/030042 filed on Mar. 8, 2013, the contents of the disclosure are incorporated by reference herein in its entirety. In some embodiments,

[0307] By “plant” is intended whole plants, plant organs (e.g., leaves, stems, roots, etc.), seeds, plant cells, propagules, embryos and progeny of the same. Plant cells can be differentiated or undifferentiated (e.g. callus, suspension culture cells, protoplasts, leaf cells, root cells, phloem cells, pollen).

[0308] “Transgenic plants” or “transformed plants” or “stably transformed” plants or cells or tissues refers to plants that have incorporated or integrated exogenous nucleic acid sequences or DNA fragments into the plant cell. These nucleic acid sequences include those that are exogenous, or not present in the untransformed plant cell, as well as those that may be endogenous, or present in the untransformed plant cell. “Heterologous” generally refers to the nucleic acid sequences that are not endogenous to the cell or part of the native genome in which they are present, and have been added to the cell by infection, transfection, microinjection, electroporation, microprojection, or the like.

[0309] Transformation of plant cells can be accomplished by one of several techniques known in the art. The DNA construct of the invention may be modified to obtain or enhance expression in plant cells. Typically a construct that expresses such a protein would contain a promoter to drive transcription of the gene, as well as a 3′ untranslated region to allow transcription termination and polyadenylation. The organization of such constructs is well known in the art. In some instances, it may be useful to engineer the gene such that the resulting peptide is secreted, or otherwise targeted within the plant cell. For example, the gene can be engineered to contain a signal peptide to facilitate transfer of the peptide to the endoplasmic reticulum. It may also be preferable to engineer the plant expression cassette to contain an intron, such that mRNA processing of the intron is required for expression.

[0310] In various embodiments, DNA constructs comprising a polynucleotide that encodes an insecticidal and/or nematicidal protein of the present invention may be transiently or stably transformed into unmodified plant cells or may be transformed into previously genetically altered plant cells. In one embodiment, DNA constructs comprising a polynucleotide that encodes an insecticidal and/or nematicidal protein of the present invention may be stably transformed into unmodified plant cells, i.e. plant cells that have not previously been transformed or transfected with any heterologous DNA or RNA material. Methods for stable integration of foreign or heterologous expression vectors, are described below. In other embodiments, the genetically unaltered plant cells can be transformed with one DNA construct comprising a polynucleotide operable to encode one insecticidal and/or nematicidal protein of the present invention. In this embodiment, the insecticidal and/or nematicidal protein contains only one type of TP, for example, an ICK motif TP. In other embodiments, the genetically unaltered plant cells can be transformed with two different DNA constructs, each construct comprising a polynucleotide operable to encode one insecticidal and/or nematicidal protein of the present invention, wherein the insecticidal and/or nematicidal protein of each construct comprises different TPs, for example, in one DNA construct, the insecticidal and/or nematicidal protein comprises one or more copies of an ICK motif TP and the other DNA construct comprises a polynucleotide that encodes a different TP, for example a Bt TP. Expression of both types of insecticidal and/or nematicidal proteins can be manipulated by using the same promoter or different promoters and other control sequences to cause the differential expression of either insecticidal and/or nematicidal protein, or both insecticidal and/or nematicidal proteins together.

[0311] In some embodiments, a transgenic plant or part thereof, can produce or express one or more insecticidal and/or nematicidal proteins containing one or more TPs. In one embodiment, the TP is an ICK TP, for example, a Hybrid-ACTX-Hv1a, for example, a TP having an amino acid sequence of SEQ ID NO: 5 or 6 (or a variant thereof) and/or the ICK TP expressed may contain 20-100 amino acids and 2-4 disulfide bonds and or the ICK TP is any insecticidal peptide with at least 50%, 55%, 60%, 65%, 70%, 75%, 80%, 85%, 90%, 95%, 96%, 97%, 98%, or 99% or greater sequence identity to any of the ICK TPs described herein and/or a Bt TP and specifically exemplified in any TP having an amino acid sequence as set forth in SEQ ID NOs: 5-1593 and 1761-1775, or a variant thereof.

[0312] In various embodiments, a transgenic plant may express and produce one or more ICK TPs, which may be the same or they may be different, (for example, an Omega-ACTX TP, a Kappa-ACTX TP or a U-ACTX TP, for example, a Hybrid-ACTX-Hv1a TP), or a TP having at least 80%, at least 85%, at least 90%, at least 95%, at least 96%, at least 97%, at least 98%, at least 99%, or at least 100% sequence identity or sequence homology to a peptide or protein having an amino acid sequence as set forth in SEQ ID NOs: 5, 6 and 1761, 1762, 1767, 1771-1773, and variants thereof, (wherein the TPs, if more than one, may be the same or different).

[0313] In another embodiment, a transgenic plant or part thereof, may express and produce one or more Bt TPs, which may be the same or different. It is to be understood, that although a transgenic plant, or part thereof may express and produce the same type of TPs or different TPs, a transgenic plant will not have a single DNA construct which is operable to encode and express an ICK TP and a Bt TP from the same DNA construct. These two types of TPs may be expressed and produced in a plant or part thereof, but these two types of TPs originate from separate DNA constructs as described herein. The transgenic plants disclosed herein can contain, express, and produce an insecticidal and/or nematicidal protein containing a known Bt TP, including a Cry or Cyt protein TP, and/or a Bt TP selected from the group consisting of a Cry1, Cry3, TIC851, CryET70, Cry22, TIC901, TIC201, TIC407, TIC417, a CryET80, and CryET76, TIC100 TIC101, ET29, ET37, TIC810, TIC812, PS149B1, and combinations thereof. The Bt TP can be selected from a Cry protein, a Cry1A protein or a Cry1F protein, or a combination Cry1F-Cry1A protein, or it comprises an amino acid sequence at least 90% identical to SEQ ID NO: 10, 12, 14, 26, 28, or 34 of U.S. Pat. No. 7,304,206. In some embodiments, a transgenic plant can produce an insecticidal and/or nematicidal protein comprising a Bt TP, for example, Dipel and/or Thuricide.

[0314] In some embodiments, a transgenic plant expressing the TPs described herein where the average concentration of each of Bt and ICK TPs as a percentage weight of the total amount of expressed TP in an average leaf of a transformed plant is about: 1, 5, 10, 15, 20, 25, 30, 35, 40, 45, 50, 55, 60, 65, 70, 75, 80, 85, 90, 95 or 99%, or any range between any two of these values.

[0315] In some embodiments, the insecticidal and/or nematicidal protein described herein is expressed in corn, soybean, cotton, rice, sorghum, switchgrass, sugarcane, alfalfa, potatoes or tomatoes. In some embodiments, the insecticidal and/or nematicidal protein is expressed in a transgenic seed having an insecticidal and/or nematicidal protein as described above.

[0316] In other embodiments, a DNA construct comprising a polynucleotide operable to encode an insecticidal and/or nematicidal protein of the present invention can be transiently or stably expressed in a plant cell that has been previously genetically modified, for example, a plant cell that has been previously transformed with another TP, for example, an ICK motif TP or a Bt TP as described herein. In this embodiment, the DNA construct of the present invention can be transformed such that the expression of either the insecticidal and/or nematicidal protein or the previously introduced TP can be controlled by the same promoters or each of the insecticidal and/or nematicidal protein and previously introduced TP can be controlled using different promoters or expression conditions to facilitate differential expression of both. It is to be understood, that transformation of two different Bt TPs cannot occur, whether the DNA construct comprises a polynucleotide operable to encode an insecticidal and/or nematicidal protein having multiple TPs or transformation of multiple DNA constructs containing single TPs. In either case, only a single species of Bt TP can be transformed into the plant, whether expressed as a single TP or in insecticidal and/or nematicidal proteins containing multiple copies of the same species of Bt TP.

[0317] In some embodiments, the present invention provides a transgenic plant comprising a combination of a Bt (Bacillus thuringiensis) TP and an ICK (Inhibitor Cystine Knot) TP. This transgenic plant can be made from independent and separate stable genetic insertions of DNA constructs as provided herein that create a first flowering plant expressing a Bt TP and a second flowering plant expressing an ICK TP. The pollen of one of those plants will be crossed onto the female flower organs of the other plant to form a genetic hybridization that contains both an insecticidal and/or nematicidal proteins comprising a Bt TP and a different insecticidal and/or nematicidal protein that comprises an ICK TP genetic traits. The progeny of that sexual cross and further crossing that results in the inheritance of both traits will result in a transgenic plant comprising a combination of a Bt (Bacillus thuringiensis) TP and an ICK (Inhibitor Cystine Knot) TP.

[0318] In some embodiments, transgenic plants or parts thereof, are operable to express an insecticidal and/or nematicidal protein encoded by a DNA construct encoding an insecticidal and/or nematicidal protein, wherein the insecticidal and/or nematicidal protein comprises an ERSP fused in frame with the N-terminus of a binary or tertiary peptide, the binary or tertiary peptide is fused in frame with a construct comprising (TP-L)ₙ or the insecticidal and/or nematicidal protein comprises an ERSP fused in frame with a binary peptide and/or a repeat construct (L-TP)ₙ or (TP-L)ₙ. In various embodiments, the exemplary insecticidal and/or nematicidal protein can include the construct: (ERSP)-(TP-L)ₙ, or (ERSP)-(L)-(TP-L)ₙ, or (ERSP)-(L-TP)ₙ, or (ERSP)-(L-TP)ₙ-(L). In another embodiment, a transgenic plant, or part thereof comprises a polynucleotide operably linked to an operable promoter, wherein the polynucleotide encodes an insecticidal and/or nematicidal protein comprising an ERSP fused in frame with the N-terminus of a stabilizing domain (STA). The STA is fused in frame with either the N-terminus of a binary or tertiary peptide, or the N-terminus of a construct comprising: (L-TP)ₙ, (L-TP)ₙ-L, (TP-L)ₙ, or L-(TP-L)ₙ. In various embodiments, an exemplary insecticidal and/or nematicidal protein can include a construct from N-terminus to C-terminus: (ERSP)-(L)-TP-(L)-TP, (ERSP)-(L)-TP-(L)-TP-(L), (L-TP)ₙ-L, (L-TP-L)ₙ, (ERSP)-(TP-L)ₙ, (ERSP)-(L)-(TP-L)ₙ, (ERSP)-(L-TP)ₙ, (ERSP)-(L-TP)ₙ-(L), (ERSP)-(STA)-(L-TP)ₙ, (ERSP)-(STA)-(L-TP)ₙ-(L), (ERSP)-(STA)-(TP-L)ₙ, or (ERSP)-(STA)-(L)-(TP-L)ₙ, or (STA)-(L-TP)ₙ, or (STA)-(L-TP)ₙ-(L), or (STA)-(TP-L)ₙ, or (STA)-(L)-(TP-L)ₙ, wherein (L) is a binary peptide or a tertiary peptide, and which each L may be the same or different, TP is a toxic peptide, which may be the same or different, and n is an integer ranging from 1 to 200, preferably 1 to 100, and most preferably, 1 to 10. In some embodiments, the insecticidal and/or nematicidal protein may contain TPs that are the same or different, and binary and/or tertiary peptides that are the same or different. In some embodiments, the C-terminal TP is fused or unfused at its C-terminus with a binary or tertiary peptide. In related embodiments of the above, transgenic plants or parts thereof may comprise one or more TPs useful in the manufacture of an insecticidal and/or nematicidal protein. Transgenic plants or parts thereof may comprise an insecticidal and/or nematicidal protein, which may include one or more ICK TPs, for example, a TP selected from an “ACTX” or “ACTX peptide” family of insecticidal ICK peptides that have been isolated from an Australian funnel-web spiders belonging to the Atracinae subfamily, for example, one or more TPs selected from an Omega-ACTX TP, a Kappa-ACTX TP and an U-ACTX TP, for example, U+2-ACTX-Hv1a, U-ACTX-Hv1a, rU-ACTX-Hv1a, rU-ACTX-Hv1b, or a hybrid-ACTX-Hv1a peptide, or a TP having at least 80%, at least 85%, at least 90%, at least 95%, at least 96%, at least 97%, at least 98%, at least 99%, or at least 100% sequence identity or sequence homology to a peptide or protein having an amino acid sequence as set forth in SEQ ID NOs: 5, 6 and 1761, 1762, 1767, 1771-1773, and variants thereof, (wherein the TPs, if more than one, may be the same or different) and each insecticidal and/or nematicidal protein further comprising one or more tertiary peptides (designated above as L), which may include the amino acid sequence of a binary peptide selected from IFVRLR (SEQ ID NO: 1619), ALKLFV (SEQ ID NO: 1605), ALKFLV (SEQ ID NO: 1603), RRKAFV (SEQ ID NO: 1644), or LFAAPF (SEQ ID NO: 1621), fused in frame either on the N-terminus, C-terminus or both termini of the binary peptide with a Z region or spacer sequence selected from the group of or consisting of GS, WN, WQ, MA, MV, AM, LH, MN, ES, WQ, or DT.

[0319] In various embodiments, the plant or part thereof, for example a plant cell, has been previously transformed with a Bt TP and the plant or part thereof, for example a plant cell containing a Bt TP is subsequently transformed with a DNA construct operable to encode an insecticidal and/or nematicidal protein, which may include one or more ICK TPs, for example, a TP selected from an “ACTX” or “ACTX peptide” family of insecticidal ICK peptides that have been isolated from an Australian funnel-web spiders belonging to the Atracinae subfamily, for example, one or more TPs selected from an Omega-ACTX TP, a Kappa-ACTX TP and an U-ACTX TP, for example, U+2-ACTX-Hv1a, U-ACTX-Hv1a, rU-ACTX-Hv1a, rU-ACTX-Hv1b, or a hybrid-ACTX-Hv1a peptide, or a TP having at least 80%, at least 85%, at least 90%, at least 95%, at least 96%, at least 97%, at least 98%, at least 99%, or at least 100% sequence identity or sequence homology to a peptide or protein having an amino acid sequence as set forth in SEQ ID NOs: 5, 6 and 1761, 1762, 1767, 1771-1773, and variants thereof, (wherein the TPs, if more than one, may be the same or different) and each insecticidal and/or nematicidal protein further comprising one or more tertiary peptides (designated above as L), which may include the amino acid sequence of a binary peptide selected from IFVRLR (SEQ ID NO: 1619), ALKLFV (SEQ ID NO: 1605), ALKFLV (SEQ ID NO: 1603), RRKAFV (SEQ ID NO: 1644), or LFAAPF (SEQ ID NO: 1621), fused in frame either on the N-terminus, C-terminus or both termini of the binary peptide with a Z region or spacer sequence selected from the group of or consisting of GS, WN, WQ, MA, MV, AM, LH, MN, ES, WQ, or DT. The resulting plant or part thereof, for example, a plant cell, has stable expression of a Bt TP and an insecticidal and/or nematicidal protein containing one or more ICK motif TPs.

[0320] In various embodiments, insecticidal and/or nematicidal proteins can also be integrated into plant genome using stable plant transformation technology, and therefore insecticidal and/or nematicidal proteins can be stably expressed in plants and protect the transformed plants from generation to generation. For the stable transformation of plants, an expression vector comprising the DNA construct can be circular or linear. A few critical components must be included in the vector DNA. The insecticidal and/or nematicidal insecticidal and/or nematicidal protein ORF for stable plant transformation should be carefully designed for optimal expression in plants based on the study in the transient plant expression as described above. The expression of insecticidal and/or nematicidal insecticidal and/or nematicidal protein is usually controlled by a promoter that drives transcription in some of all cells of the transgenic plant. The promoter can be a strong plant viral promoter, for example, the constitutive 35S promoter from Cauliflower Mosaic Virus (CaMV); it also can be a strong plant promoter, for example, the hydroperoxide lyase promoter (pHPL) from Arabidopsis thaliana; the Glycine max polyubiquitin (Gmubi) promoter from soybean; the ubiquitin promoters from different plant species (rice, corn, potato, etc.), etc. A plant transcriptional terminator often occurs after the stop codon of the ORF to halt the RNA polymerase and transcription of the mRNA. To evaluate the insecticidal and/or nematicidal insecticidal and/or nematicidal protein expression, a reporter gene can be included in the expression vector, for example, beta-glucuronidase gene (GUS) for GUS straining assay, green fluorescent protein (GFP) gene for green fluorescence detection under UV light, etc. For selection of transformed plants, a selection marker gene is usually included in the expression vector. The marker gene expression product can provide the transformed plant with resistance to specific antibiotics, for example, kanamycin, hygromycin, etc., or specific herbicide, for example, glyphosate etc. If agroinfection technology is adopted for plant transformation, T-DNA left border and right border sequences are also included in the expression vector to transport the T-DNA portion into the plant. The constructed expression vector can be transformed into plant cells or tissues using any number of established and well known transformation technologies. Agroinfection is a very popular way to transform a plant using an Agrobacterium tumefaciens strain or an Agrobacterium rhizogenes strain. Particle bombardment (also called Gene Gun, or Biolistics) technology is also very commonly used for plant transformation. Other less commonly used transformation methods include tissue electroportation, silicon carbide whiskers, direct injection of DNA, etc. After transformation, the transformed plant cells or tissues placed on plant regeneration media to regenerate successfully transformed plant cells or tissues into transgenic plants. The evaluation of the integration and expression of the insecticidal and/or nematicidal insecticidal and/or nematicidal protein ORF in the transformed plant can be performed.

[0321] In some embodiments, a “plant expression cassette” can be inserted into a “plant transformation vector”. The illustrative plant transformation vector may be comprised of one or more DNA vectors needed for achieving plant transformation. For example, it is a common practice in the art to utilize plant transformation vectors that are comprised of more than one contiguous DNA segment. These vectors are often referred to in the art as “binary vectors”. Binary vectors as well as vectors with helper plasmids are most often used for Agrobacterium-mediated transformation, where the size and complexity of DNA segments needed to achieve efficient transformation is quite large, and it is advantageous to separate functions onto separate DNA molecules. Binary vectors typically contain a plasmid vector that contains the cis-acting sequences required for T-DNA transfer (such as left border and right border), a selectable marker that is engineered to be capable of expression in a plant cell, and a “gene of interest” (a gene engineered to be capable of expression in a plant cell for which generation of transgenic plants is desired). Also present on this plasmid vector are sequences required for bacterial replication. The cis-acting sequences are arranged in a fashion to allow efficient transfer into plant cells and expression therein. For example, the selectable marker gene and the insecticidal and/or nematicidal protein described herein are located between the left and right borders. Often a second plasmid vector contains the trans-acting factors that mediate T-DNA transfer from Agrobacterium to plant cells. This plasmid often contains the virulence functions (Vir genes) that allow infection of plant cells by Agrobacterium, and transfer of DNA by cleavage at border sequences and vir-mediated DNA transfer, as is understood in the art (Hellens and Mullineaux (2000) Trends in Plant Science 5:446-451). Several types of Agrobacterium strains (e.g., LBA4404, GV3101, EHA101, EHA105, etc.) can be used for plant transformation. The second plasmid vector is not necessary for transforming the plants by other methods such as microprojection, microinjection, electroporation, polyethylene glycol, etc.

[0322] In general, plant transformation methods involve transferring heterologous DNA into target plant cells (e.g., immature or mature embryos, suspension cultures, undifferentiated callus, protoplasts, etc.), followed by applying a maximum threshold level of appropriate selection (depending on the selectable marker gene) to recover the transformed plant cells from a group of untransformed cell mass. Explants are typically transferred to a fresh supply of the same medium and cultured routinely. Subsequently, the transformed cells are differentiated into shoots after placing on regeneration medium supplemented with a maximum threshold level of selecting agent. The shoots are then transferred to a selective rooting medium for recovering rooted shoot or plantlet. The transgenic plantlet then grows into a mature plant and produces fertile seeds (e.g. Hiei et al. (1994) The Plant Journal 6:271-282; Ishida et al. (1996) Nature Biotechnology 14:745-750). Explants are typically transferred to a fresh supply of the same medium and cultured routinely. A general description of the techniques and methods for generating transgenic plants are found in Ayres and Park (1994) Critical Reviews in Plant Science 13:219-239 and Bommineni and Jauhar (1997) Maydica 42:107-120. Since the transformed material contains many cells; both transformed and non-transformed cells are present in any piece of subjected target callus or tissue or group of cells. The ability to kill non-transformed cells and allow transformed cells to proliferate results in transformed plant cultures. Often, the ability to remove non-transformed cells is a limitation to rapid recovery of transformed plant cells and successful generation of transgenic plants.

[0323] Transformation protocols as well as protocols for introducing nucleotide sequences into plants may vary depending on the type of plant or plant cell, i.e., monocot or dicot, targeted for transformation. Generation of transgenic plants may be performed by one of several methods, including, but not limited to, microinjection, electroporation, direct gene transfer, introduction of heterologous DNA by Agrobacterium into plant cells (Agrobacterium-mediated transformation), bombardment of plant cells with heterologous foreign DNA adhered to particles, ballistic particle acceleration, aerosol beam transformation (U.S. Published Application No. 20010026941; U.S. Pat. No. 4,945,050; International Publication No. WO 91/00915; U.S. Published Application No. 2002015066), Lec1 transformation, and various other non-particle direct-mediated methods to transfer DNA.

[0324] Methods for transformation of chloroplasts are known in the art. See, for example, Svab et al. (1990) Proc. Natl. Acad. Sci. USA 87:8526-8530; Svab and Maliga (1993) Proc. Natl. Acad. Sci. USA 90:913-917; Svab and Maliga (1993) EMBO J. 12:601-606. The method relies on particle gun delivery of DNA containing a selectable marker and targeting of the DNA to the plastid genome through homologous recombination. Additionally, plastid transformation can be accomplished by transactivation of a silent plastid-borne transgene by tissue-preferred expression of a nuclear-encoded and plastid-directed RNA polymerase. Such a system has been reported in McBride et al. (1994) Proc. Natl. Acad. Sci. USA 91:7301-7305.

[0325] Following integration of heterologous foreign DNA into plant cells, one then applies a maximum threshold level of appropriate selection in the medium to kill the untransformed cells and separate and proliferate the putatively transformed cells that survive from this selection treatment by transferring regularly to a fresh medium. By continuous passage and challenge with appropriate selection, one identifies and proliferates the cells that are transformed with the plasmid vector. Molecular and biochemical methods can then be used to confirm the presence of the integrated heterologous gene of interest into the genome of the transgenic plant.

[0326] The cells that have been transformed may be grown into plants in accordance with conventional ways. See, for example, McCormick et al. (1986) Plant Cell Reports 5:81-84. These plants may then be grown, and either pollinated with the same transformed strain or different strains, and the resulting hybrid having constitutive expression of the desired phenotypic characteristic identified. Two or more generations may be grown to ensure that expression of the desired phenotypic characteristic is stably maintained and inherited and then seeds harvested to ensure expression of the desired phenotypic characteristic has been achieved. In this manner, the present invention provides transformed seed (also referred to as “transgenic seed”) having a nucleotide construct of the invention, for example, an expression cassette of the invention, stably incorporated into their genome.

[0327] (5A). Evaluation of Plant Transformations

[0328] Following introduction of heterologous foreign DNA into plant cells, the transformation or integration of heterologous gene in the plant genome is confirmed by various methods such as analysis of nucleic acids, proteins and metabolites associated with the integrated gene.

[0329] PCR analysis is a rapid method to screen transformed cells, tissue or shoots for the presence of incorporated gene at the earlier stage before transplanting into the soil (Sambrook and Russell (2001) Molecular Cloning: A Laboratory Manual. Cold Spring Harbor Laboratory Press, Cold Spring Harbor, N.Y.). PCR is carried out using oligonucleotide primers specific to the gene of interest or Agrobacterium vector background, etc.

[0330] Plant transformation may be confirmed by Southern blot analysis of genomic DNA (Sambrook and Russell, 2001, supra). In general, total DNA is extracted from the transformant, digested with appropriate restriction enzymes, fractionated in an agarose gel and transferred to a nitrocellulose or nylon membrane. The membrane or “blot” is then probed with, for example, radiolabeled .sup.32P target DNA fragment to confirm the integration of introduced gene into the plant genome according to standard techniques (Sambrook and Russell, 2001, supra).

[0331] In Northern blot analysis, RNA is isolated from specific tissues of transformant, fractionated in a formaldehyde agarose gel, and blotted onto a nylon filter according to standard procedures that are routinely used in the art (Sambrook and Russell, 2001, supra). Expression of RNA encoded by the Bt-protein is then tested by hybridizing the filter to a radioactive probe derived from a Bt-protein, by methods known in the art (Sambrook and Russell, 2001, supra).

[0332] Western blot, biochemical assays and the like may be carried out on the transgenic plants to confirm the presence of the transformed TP by standard procedures (Sambrook and Russell, 2001, supra) using antibodies that bind to one or more epitopes present on the TP.

[0333] Accordingly, the present invention provides a transgenic plant or part thereof, which comprises a polynucleotide operably linked to an operable promoter, for example, a homologous or heterologous promoter, wherein the polynucleotide encodes: a peptide comprising either a binary or a tertiary peptide as described herein. In some embodiments, the binary or tertiary peptide can include an amino acid sequence of at least 4 amino acids and up to a maximum of 16 amino acids. The binary peptide has two regions and the tertiary has the same two regions and one additional region called a spacer. Each of the binary and/or tertiary peptides can be cleaved by both an animal gut protease, for example a human gastrointestinal protease and an insect or nematode gut protease. In various embodiments, the polynucleotide also encodes an Endoplasmic Reticulum Signal Peptide (ERSP) which is fused at its C-terminus with the N-terminus of a binary and/or tertiary peptide. In these embodiments, the binary and/or tertiary peptides are also operably fused to the N-terminus of a TP. In still other embodiments, the transgenic plant may contain a cell or a plurality of cells transformed with a DNA construct comprising at least one polynucleotide operably linked to an operable promoter, for example, a homologous or heterologous promoter, wherein the polynucleotide encodes an insecticidal and/or nematicidal protein having two or more cleavable binary or tertiary peptides. The insecticidal and/or nematicidal protein comprises an ERSP fused in frame at its C-terminus with the N-terminus of the binary or tertiary peptide, and the binary or tertiary peptide is fused in frame at its C-terminus with a construct comprising: (TP-L)ₙ wherein TP is toxic peptide or protein, L is a binary or tertiary peptide and n is an integer ranging from 1 to 200, or from 1 to 100, or from 1 to 10. In these insecticidal and/or nematicidal proteins, the last TP of the insecticidal and/or nematicidal protein, i.e. at its C-terminus, may be fused or unfused at its C-terminus with a binary or tertiary peptide. In various embodiments, an exemplary insecticidal and/or nematicidal protein can include the structure: (ERSP)-(TP-L)ₙ, or (ERSP)-(L)-(TP-L)ₙ, or (ERSP)-(L-TP)ₙ, or (ERSP)-(L-TP)ₙ-(L). In another embodiment, a plant, or part thereof comprises a polynucleotide operably linked to an operable promoter, for example, a homologous or heterologous promoter, wherein the polynucleotide encodes an insecticidal and/or nematicidal protein comprising an ERSP fused in frame with the N-terminus of a stabilizing domain (STA). The STA is fused in frame with either the N-terminus of a binary or tertiary peptide, or the N-terminus of a construct comprising: (L-TP)ₙ, (L-TP)ₙ-L, (TP-L)ₙ, or L-(TP-L)ₙ. In various embodiments, an exemplary insecticidal and/or nematicidal protein can comprise, or selected from the group consisting of, or consisting of a construct from N-terminus to C-terminus: (ERSP)-(L)-TP-(L)-TP, (ERSP)-(L)-TP-(L)-TP-(L), (L-TP)ₙ-L, (L-TP-L)ₙ, (ERSP)-(TP-L)ₙ, (ERSP)-(L)-(TP-L)ₙ, (ERSP)-(L-TP)ₙ, (ERSP)-(L-TP)ₙ-(L), (ERSP)-(STA)-(L-TP)ₙ, (ERSP)-(STA)-(L-TP)ₙ-(L), (ERSP)-(STA)-(TP-L)ₙ, or (ERSP)-(STA)-(L)-(TP-L)ₙ, or (STA)-(L-TP)ₙ, or (STA)-(L-TP)ₙ-(L), or (STA)-(TP-L)ₙ, or (STA)-(L)-(TP-L)ₙ, wherein (L) is a binary peptide or a tertiary peptide, and which each L may be the same or different, TP is a toxic peptide, which may be the same or different, and n is an integer ranging from 1 to 200, preferably 1 to 100, and most preferably, 1 to 10. In some embodiments, the insecticidal and/or nematicidal protein may contain TPs that are the same or different, and binary and/or tertiary peptides that are the same or different. In some embodiments, the C-terminal TP is fused or unfused at its C-terminus with a binary or tertiary peptide.

[0334] In some embodiments, transgenic plants or parts thereof, that may be receptive to the expression of insecticidal and/or nematicidal peptide compositions comprising a cleavable linking peptide described herein, can include: alfalfa, banana, barley, bean, broccoli, cabbage, canola, carrot, cassava, castor, cauliflower, celery, chickpea, Chinese cabbage, citrus, coconut, coffee, corn, clover, cotton, a cucurbit, cucumber, Douglas fir, eggplant, eucalyptus, flax, garlic, grape, hops, leek, lettuce, Loblolly pine, millets, melons, nut, oat, olive, onion, ornamental, palm, pasture grass, pea, peanut, pepper, pigeonpea, pine, potato, poplar, pumpkin, Radiata pine, radish, rapeseed, rice, rootstocks, rye, safflower, shrub, sorghum, Southern pine, soybean, spinach, squash, strawberry, sugar beet, sugarcane, sunflower, sweet corn, sweet gum, sweet potato, switchgrass, tea, tobacco, tomato, triticale, turf grass, watermelon, and a wheat plant. In some embodiments the transgenic plant may be grown from cells that were initially transformed with the DNA constructs described herein. In other embodiments, the transgenic plant may express the encoded insecticidal and/or nematicidal peptide compositions in a specific tissue, or plant part, for example, a leaf, a stem a flower, a sepal, a fruit, a root, or a seed or combinations thereof.

[0335] In another aspect of the invention, one may generate transgenic plants expressing an insecticidal and/or nematicidal insecticidal and/or nematicidal protein that when cleaved in the presence of an appropriate protease has pesticidal activity. Methods described above by way of example may be utilized to generate transgenic plants, but the manner in which the transgenic plant cells are generated is not critical to this invention. Methods known or described in the art such as Agrobacterium-mediated transformation, biolistic transformation (See for example, Kikkert JR1, Vidal J R, Reisch B I., “Stable transformation of plant cells by particle bombardment/biolistics.”, Methods Mol Biol. 2005; 286:61-78, the disclosure of which is incorporated herein by reference in its entirety), and non-particle-mediated methods may be used. Plants expressing an insecticidal and/or nematicidal insecticidal and/or nematicidal protein may be isolated by common methods described in the art, for example by transformation of callus, selection of transformed callus, and regeneration of fertile plants from such transgenic callus. In such process, one may use any gene as a selectable marker so long as its expression in plant cells confers ability to identify or select for transformed cells.

[0336] A number of markers have been developed for use with plant cells, such as resistance to chloramphenicol, the aminoglycoside G418, hygromycin, or the like. Other genes that encode a product involved in chloroplast metabolism may also be used as selectable markers. For example, genes that provide resistance to plant herbicides such as glyphosate, bromoxynil, or imidazolinone may find particular use. Such genes have been reported (Stalker et al. (1985) J. Biol. Chem. 263:6310-6314 (bromoxynil resistance nitrilase gene); and Sathasivan et al. (1990) Nucl. Acids Res. 18:2188 (AHAS imidazolinone resistance gene). Additionally, the genes disclosed herein are useful as markers to assess transformation of bacterial or plant cells. Methods for detecting the presence of a transgene in a plant, plant organ (e.g., leaves, stems, roots, etc.), seed, plant cell, propagule, embryo or progeny of the same are well known in the art. In one embodiment, the presence of the transgene is detected by testing for pesticidal activity.

[0337] Fertile plants expressing an insecticidal and/or nematicidal protein may be tested for pesticidal activity, and the plants showing optimal activity selected for further breeding. Methods are available in the art to assay for pest activity. Generally, the cleaved TP is mixed and used in feeding assays. See, for example Marrone et al. (1985) J. of Economic Entomology 78:290-293.

[0338] Accordingly, the present invention provides a transgenic plant, meaning a plant, or part thereof that has been transformed with a DNA construct comprising a polynucleotide operably linked to an operable promoter, for example, a homologous or heterologous promoter that is operable in the plant cell thus transformed. In some embodiments, the transformed polynucleotide encodes: a peptide comprising either a binary or a tertiary peptide, wherein the peptide contains at least 4 amino acids and up to a maximum of 16 amino acids, and is comprised of 2 or 3 different regions. The binary peptide has 2 different regions and the tertiary peptide has 3 different regions. The binary and tertiary peptide can be cleaved by both an animal, for example a human, gut protease and an insect or nematode gut protease. The binary or tertiary peptide is operably fused to the C-terminus of an Endoplasmic Reticulum Signal Peptide (ERSP) and operably fused to the N-terminus of a TP. In various embodiments, the plant cell is transformed with a DNA construct comprising at least one polynucleotide operably linked to an operable promoter, for example, a homologous or heterologous promoter, wherein the polynucleotide encodes an insecticidal and/or nematicidal protein having one or more cleavable binary or tertiary peptides. The insecticidal and/or nematicidal protein comprises an ERSP fused in frame with the N-terminus of the binary or tertiary peptide, and the binary or tertiary peptide is fused in frame with a construct comprising (TP-L)ₙ wherein TP is toxic protein, L is a binary or tertiary peptide and n is an integer ranging from 1 to 200 and wherein the C-terminal TP is fused or unfused at its C-terminus with a binary or tertiary peptide. In some embodiments, the present invention provides a transgenic plant wherein the insecticidal and/or nematicidal protein that is expressed in the transgenic plant, or part thereof, is derived from a DNA construct that encodes an ERSP fused in frame with the N-terminus of the binary or tertiary peptide, and the binary or tertiary peptide is fused in frame with a construct comprising (TP-L)ₙ wherein TP is toxic protein, L is a binary or tertiary peptide and n is an integer ranging from 1 to 200 and wherein the C-terminal TP is fused or unfused at its C-terminus with a binary or tertiary peptide. In various embodiments, an exemplary insecticidal and/or nematicidal protein can include the structure: (ERSP)-(TP-L)ₙ, or (ERSP)-(L)-(TP-L)ₙ, or (ERSP)-(L-TP)ₙ, or (ERSP)-(L-TP)ₙ-(L). In another embodiment, a plant, or part thereof comprises a polynucleotide operably linked to an operable promoter, for example, a homologous or heterologous promoter, wherein the polynucleotide encodes an insecticidal and/or nematicidal protein comprising an ERSP fused in frame with the N-terminus of a stabilizing domain (STA). The STA is fused in frame with either the N-terminus of a binary or tertiary peptide, or the N-terminus of a construct comprising: (L-TP)ₙ, (L-TP)ₙ-L, (TP-L)ₙ, or L-(TP-L)ₙ. In various embodiments, an exemplary insecticidal and/or nematicidal protein can include a construct from N-terminus to C-terminus comprising: (ERSP)-(L)-TP-(L)-TP, (ERSP)-(L)-TP-(L)-TP-(L), (L-TP)ₙ-L, (L-TP-L)ₙ, (ERSP)-(TP-L)ₙ, (ERSP)-(L)-(TP-L)ₙ, (ERSP)-(L-TP)ₙ, (ERSP)-(L-TP)ₙ-(L), (ERSP)-(STA)-(L-TP)ₙ, (ERSP)-(STA)-(L-TP)ₙ-(L), (ERSP)-(STA)-(TP-L)ₙ, or (ERSP)-(STA)-(L)-(TP-L)ₙ, or (STA)-(L-TP)ₙ, or (STA)-(L-TP)ₙ-(L), or (STA)-(TP-L)ₙ, or (STA)-(L)-(TP-L)ₙ, wherein (L) is a binary peptide or a tertiary peptide, and which each L may be the same or different, TP is a toxic peptide, which may be the same or different, and n is an integer ranging from 1 to 200, preferably 1 to 100, and most preferably, 1 to 10. In some embodiments, the insecticidal and/or nematicidal protein may contain TPs that are the same or different, and binary and/or tertiary peptides that are the same or different. In some embodiments, the C-terminal TP is fused or unfused at its C-terminus with a binary or tertiary peptide. In related embodiments of the above, TPs useful in the manufacture of a DNA construct or polynucleotide encoding: (1) an insecticidal and/or nematicidal protein, which may include one or more ICK TPs, for example, a TP selected from an “ACTX” or “ACTX peptide” family of insecticidal ICK peptides that have been isolated from an Australian funnel-web spiders belonging to the Atracinae subfamily, for example, one or more TPs for example, selected from an Omega-ACTX TP, a Kappa-ACTX TP and an U-ACTX TP, for example, U+2-ACTX-Hv1a, U-ACTX-Hv1a, rU-ACTX-Hv1a, rU-ACTX-Hv1b, or a hybrid-ACTX-Hv1a peptide, or a TP having at least 80%, at least 85%, at least 90%, at least 95%, at least 96%, at least 97%, at least 98%, at least 99%, or at least 100% sequence identity or sequence homology to a peptide or protein having an amino acid sequence as set forth in SEQ ID NOs: 5, 6 and 1761, 1762, 1767, 1771-1773, and variants thereof, (wherein the TPs, if more than one, may be the same or different) and each insecticidal and/or nematicidal protein further comprising one or more tertiary peptides (designated above as L), which may include the amino acid sequence of a binary peptide selected from IFVRLR (SEQ ID NO: 1619), ALKLFV (SEQ ID NO: 1605), ALKFLV (SEQ ID NO: 1603), RRKAFV (SEQ ID NO: 1644), or LFAAPF (SEQ ID NO: 1621), fused in frame either on the N-terminus, C-terminus or both termini of the binary peptide with a Z region or spacer sequence selected from the group of or consisting of GS, WN, WQ, MA, MV, AM, LH, MN, ES, WQ, or DT.

[0339] In related embodiments, the transgenic plant expresses and produces an insecticidal and/or nematicidal protein containing one or more copies of a CRIP TP which may be derived from an Australian Funnel-web spider or sea anemone. In some embodiments, real or notional examples of transformed plants described and exemplified herein, are transformed with a CRIP TP from a spider selected from the Australian Funnel-web spiders of genus Atrax or Hadronyche or a sea anemone selected from Anemonia viridis. The transgenic plant can produce an insecticidal and/or nematicidal protein comprising one or more ICK TPs, for example, Hybrid-ACTX-Hv1a. The CRIP TP can be an ICK TP or Non-ICK TP that when expressed contains 20-100 amino acids and 2-4 disulfide bonds. The TPs useful in the transgenic peptides disclosed herein can have at least 50%, 55%, 60%, 65%, 70%, 75%, 80%, 85%, 90%, 95%, 96%, 97%, 98%, or 99% or greater sequence identity to SEQ ID NOs: 5 or 6, SEQ ID NO: 33-1032 and SEQ ID NO: 1761-1775 and variants thereof. In various embodiments, one or more of the CRIP TPs become active when the insecticidal and/or nematicidal protein's binary and/or tertiary peptides are cleaved by an appropriate protease found in the insect and/or nematode gut environment, thereby releasing the one or more TPs from the insecticidal and/or nematicidal protein to exert its insecticidal and/or nematicidal activity in the insect or nematode.

[0340] (6). Methods for Controlling a Pest Infection

[0341] In various embodiments of the present invention, methods are provided for controlling a pest infection or infestation (used interchangeably), wherein the pest may be an insect, a nematode or both. In some embodiments, the method for controlling such a pest infection includes providing in a diet of the pest, a plant, or part thereof, wherein the plant or part thereof, contains and expresses a polynucleotide which encodes an insecticidal and/or nematicidal TP as described herein. In other embodiments, a pesticidally effective amount of a composition comprising an insecticidal and/or nematicidal protein is applied to a plant, prior to the exposure to the pest, or during the pest infection or infestation, such that, the application of the insecticidal and/or nematicidal protein containing composition reduces the number of pests affecting the plant, or the severity of the pest infection on the plant thus contacted with the composition, and optionally enables the plant to survive and/or grow compared to similar plants exposed to the same pests in the absence of the composition.

[0342] In some embodiments, the plant expresses a polynucleotide which is operable to express an insecticidal and/or nematicidal protein constitutively, or inducibly. The polynucleotide may be operably linked to an operable promoter, for example, a homologous or heterologous promoter, wherein the polynucleotide encodes an insecticidal and/or nematicidal protein having one or more cleavable binary or tertiary peptides. The insecticidal and/or nematicidal protein can include the structure: (ERSP)-(TP-L)ₙ, or (ERSP)-(L)-(TP-L)ₙ, or (ERSP)-(L-TP)ₙ, or (ERSP)-(L-TP)ₙ-(L). In another embodiment, a plant, or part thereof comprises a polynucleotide operably linked to an operable promoter, for example, a homologous or heterologous promoter, wherein the polynucleotide encodes an insecticidal and/or nematicidal protein described herein, the insecticidal and/or nematicidal protein comprising an ERSP fused in frame with the N-terminus of a stabilizing domain (STA). The STA is fused in frame with either the N-terminus of a binary or tertiary peptide, or the N-terminus of a construct comprising: (L-TP)ₙ, (L-TP)ₙ-L, (TP-L)ₙ, or L-(TP-L)ₙ. In various embodiments, an exemplary insecticidal and/or nematicidal protein can comprise, or is selected from the group consisting of, or consists of: a construct from N-terminus to C-terminus: (ERSP)-(L)-TP-(L)-TP, (ERSP)-(L)-TP-(L)-TP-(L), (L-TP)ₙ-L, (L-TP-L)ₙ, (ERSP)-(TP-L)ₙ, (ERSP)-(L)-(TP-L)ₙ, (ERSP)-(L-TP)ₙ, (ERSP)-(L-TP)ₙ-(L), (ERSP)-(STA)-(L-TP)ₙ, (ERSP)-(STA)-(L-TP)ₙ-(L), (ERSP)-(STA)-(TP-L)ₙ, or (ERSP)-(STA)-(L)-(TP-L)ₙ, or (STA)-(L-TP)ₙ, or (STA)-(L-TP)ₙ-(L), or (STA)-(TP-L)ₙ, or (STA)-(L)-(TP-L)ₙ, wherein (L) is a binary peptide or a tertiary peptide, and which each L may be the same or different, TP is a toxic peptide, which may be the same or different, and n is an integer ranging from 1 to 200, preferably 1 to 100, and most preferably, 1 to 10. In some embodiments, the insecticidal and/or nematicidal protein may contain TPs that are the same or different, and binary and/or tertiary peptides that are the same or different. In some embodiments, the C-terminal TP is fused or unfused at its C-terminus with a binary or tertiary peptide. The TPs useful in the above constructs disclosed above and herein can have at least 50%, 55%, 60%, 65%, 70%, 75%, 80%, 85%, 90%, 95%, 96%, 97%, 98%, or 99% or greater sequence identity to SEQ ID NOs: 5 or 6, SEQ ID NO: 33 and/or a TP selected from SEQ ID NOs: 33-1032 and variants thereof. In related embodiments of the above, TPs useful in the manufacture of a DNA construct or polynucleotide encoding: (1) an insecticidal and/or nematicidal protein, which may include one or more ICK TPs, for example, a TP selected from an “ACTX” or “ACTX peptide” family of insecticidal ICK peptides that have been isolated from an Australian funnel-web spiders belonging to the Atracinae subfamily, for example, one or more TPs selected from an Omega-ACTX TP, a Kappa-ACTX TP and an U-ACTX TP, for example, U+2-ACTX-Hv1a, U-ACTX-Hv1a, rU-ACTX-Hv1a, rU-ACTX-Hv1b (wherein the TPs, if more than one, may be the same or different), or a TP having at least 80%, at least 85%, at least 90%, at least 95%, at least 96%, at least 97%, at least 98%, at least 99%, or at least 100% sequence identity or sequence homology to a peptide or protein having an amino acid sequence as set forth in SEQ ID NOs: 5, 6 and 1761, 1762, 1767, 1771-1773, and variants thereof, (wherein the TPs, if more than one, may be the same or different) and each insecticidal and/or nematicidal protein further comprising one or more tertiary peptides (designated above as L), which may include the amino acid sequence of a binary peptide selected from IFVRLR (SEQ ID NO: 1619), ALKLFV (SEQ ID NO: 1605), ALKFLV (SEQ ID NO: 1603), RRKAFV (SEQ ID NO: 1644), or LFAAPF (SEQ ID NO: 1621), fused in frame either on the N-terminus, C-terminus or both termini of the binary peptide with a Z region or spacer sequence selected from the group of or consisting of GS, WN, WQ, MA, MV, AM, LH, MN, ES, WQ, or DT. In related embodiments, the method for controlling a pest infection provides expression and synthesis of an insecticidal and/or nematicidal protein in a plant or part thereof, for example, a plant tissue, a plant cell, and/or a plant seed. The insecticidal and/or nematicidal protein comprises one or more cleavable linker peptides fused in frame to one or more TPs. In some embodiments, the cleavable linker peptide is a binary peptide comprising an amino acid sequence of: X₁-X₂-Y₁-Y₂, X₁-X₂-X₃-Y₁-Y₂, X₁-X₂-X₃-X₄-Y₁-Y₂, X₁-X₂-Y₁-Y₂-Y₃, X₁-X₂-X₃-Y₁-Y₂-Y₃, X₁-X₂-X₃-X₄-Y₁-Y₂-Y₃, X₁-X₂-Y₁-Y₂-Y₃-Y₄, X₁-X₂-X₃-Y₁-Y₂-Y₃-Y₄, X₁-X₂-X₃-X₄-Y₁-Y₂-Y₃-Y₄, Y₁-Y₂-X₁-X₂, Y₁-Y₂-X₁-X₂-X₃, Y₁-Y₂-X₁-X₂-X₃-X₄, Y₁-Y₂-Y₃-X₁-X₂, Y₁-Y₂-Y₃-X₁-X₂-X₃, Y₁-Y₂-Y₃-X₁-X₂-X₃-X₄, Y₁-Y₂-Y₃-Y₄-X₁-X₂, Y₁-Y₂-Y₃-Y₄-X₁-X₂-X₃, Y₁-Y₂-Y₃-Y₄-X₁-X₂-X₃-X₄, wherein each Xₙ and each Yₙ is an amino acid, and wherein each Xn and each Yn is an amino acid, and wherein X₁ is selected from the group consisting of: (all single letter amino acid format) A, D, E, G, I, K, L, N, P, Q, R, and V; X₂ is selected from the group consisting of A, F, G, I, K, L, N, P, Q, R, S, T, V, and Y; X₃ is selected from the group consisting of A, D, E, F, G, I, K, L, N, Q, R, S, T, V, and Y; X₄ is selected from the group consisting of: R, H, K, D, E, S, T, N, Q, G, A, I, L, M, F, W, Y, and V. In some embodiments, Y₁ is selected from the group consisting of: (all single letter amino acid format) A, D, E, F, G, I, L, N, Q, S, T, V, and Y; Y₂ is selected from the group consisting of F, G, I, L, and Y; and Y₃ is selected from the group consisting of A, D, E, F, G, I, K, L, R, S, T, V, and Y; and Y₄ is selected from the group consisting of: R, H, K, D, E, S, T, N, Q, G, A, I, L, M, F, W, Y, and V.

[0343] In some embodiments, an illustrative insecticidal and/or nematicidal protein for use in a method to control a pest comprises one or more illustrative binary peptides (XY or YX). In some embodiments, the insecticidal and/or nematicidal protein comprises a cleavable binary peptide having the following amino acid sequence: AFVRLF (SEQ ID NO: 1594), AKLFV (SEQ ID NO: 1595), ALFALK (SEQ ID NO: 1596), ALFLK (SEQ ID NO: 1597), ALFLR (SEQ ID NO: 1598), ALFR (SEQ ID NO: 1599), ALFRLR (SEQ ID NO: 1600), ALKALF (SEQ ID NO: 1601), ALKFF (SEQ ID NO: 1602), ALKFLV (SEQ ID NO: 1603), ALKIFV (SEQ ID NO: 1604), ALKLFV (SEQ ID NO: 1605), FFADIK (SEQ ID NO: 1606), FFALK (SEQ ID NO: 1607), FFLK (SEQ ID NO: 1608), FFLR (SEQ ID NO: 1609), FFRLR (SEQ ID NO: 1610), FGYRIK (SEQ ID NO: 1611), FLRLF (SEQ ID NO: 1612), FYARR (SEQ ID NO: 1613), GGLRKK (SEQ ID NO: 1614), IFVALK (SEQ ID NO: 1615), IFVLK (SEQ ID NO: 1616), IFVLR (SEQ ID NO: 1617), IFVR (SEQ ID NO: 1618), IFVRLR (SEQ ID NO: 1619), ILFNIK (SEQ ID NO: 1620), LFAAPF (SEQ ID NO: 1621), LFVALK (SEQ ID NO: 1622), LFVLK (SEQ ID NO: 1623), LFVLR (SEQ ID NO: 1624), LFVR (SEQ ID NO: 1625), LFVRLR (SEQ ID NO: 1626), LFVRVFL (SEQ ID NO: 1627), LGER (SEQ ID NO: 1628), LKALF (SEQ ID NO: 1629), LKFF (SEQ ID NO: 1630), LKIFV (SEQ ID NO: 1631), LKLFV (SEQ ID NO: 1632), LRALF (SEQ ID NO: 1633), LRFF (SEQ ID NO: 1634), LRIFV (SEQ ID NO: 1635), LRLFV (SEQ ID NO: 1636), RALF (SEQ ID NO: 1637), RIFV (SEQ ID NO: 1638), RLFV (SEQ ID NO: 1639), RLRALF (SEQ ID NO: 1640), RLRFF (SEQ ID NO: 1641), RLRIFV (SEQ ID NO: 1642), RLRLFV (SEQ ID NO: 1643), RRKAFV (SEQ ID NO: 1644), RRKLIF (SEQ ID NO: 1645), RRRFFA (SEQ ID NO: 1646), VFGRKG (SEQ ID NO: 1647), and YFVRK (SEQ ID NO: 1648).

[0344] In various embodiments, an illustrative insecticidal and/or nematicidal protein comprising a cleavable tertiary peptide having the following amino acid sequence construct: Z₁-X₁-X₂-Y₁-Y₂, Z₁-X₁-X₂-X₃-Y₁-Y₂, Z₁-X₁-X₂-X₃-X₄-Y₁-Y₂, Z₁-X₁-X₂-Y₁-Y₂-Y₃, Z₁-X₁-X₂-X₃-Y₁-Y₂-Y₃, Z₁-X₁-X₂-X₃-X₄-Y₁-Y₂-Y₃, Z₁-X₁-X₂-Y₁-Y₂-Y₃-Y₄, Z₁-X₁-X₂-X₃-Y₁-Y₂-Y₃-Y₄, Z₁-X₁-X₂-X₃-X₄-Y₁-Y₂-Y₃-Y₄, Z₁-Z₂-X₁-X₂-Y₁-Y₂, Z₁-Z₂-X₁-X₂-X₃-Y₁-Y₂, Z₁-Z₂-X₁-X₂-X₃-X₄-Y₁-Y₂, Z₁-Z₂-X₁-X₂-Y₁-Y₂-Y₃, Z₁-Z₂-X₁-X₂-X₃-Y₁-Y₂-Y₃, Z₁-Z₂-X₁-X₂-X₃-X₄-Y₁-Y₂-Y₃, Z₁-Z₂-X₁-X₂-Y₁-Y₂-Y₃-Y₄, Z₁-Z₂-X₁-X₂-X₃-Y₁-Y₂-Y₃-Y₄, Z₁-Z₂-X₁-X₂-X₃-X₄-Y₁-Y₂-Y₃-Y₄, Z₁-Z₂-Z₃-X₁-X₂-Y₁-Y₂, Z₁-Z₂-Z₃-X₁-X₂-X₃-Y₁-Y₂, Z₁-Z₂-Z₃-X₁-X₂-X₃-X₄-Y₁-Y₂, Z₁-Z₂-Z₃-X₁-X₂-Y₁-Y₂-Y₃, Z₁-Z₂-Z₃-X₁-X₂-X₃-Y₁-Y₂-Y₃, Z₁-Z₂-Z₃-X₁-X₂-X₃-X₄-Y₁-Y₂-Y₃, Z₁-Z₂-Z₃-X₁-X₂-Y₁-Y₂-Y₃-Y₄, Z₁-Z₂-Z₃-X₁-X₂-X₃-Y₁-Y₂-Y₃-Y₄, Z₁-Z₂-Z₃-X₁-X₂-X₃-X₄-Y₁-Y₂-Y₃-Y₄, Z₁-Z₂-Z₃-Z₄-X₁-X₂-Y₁-Y₂, Z₁-Z₂-Z₃-Z₄-X₁-X₂-X₃-Y₁-Y₂, Z₁-Z₂-Z₃-Z₄-X₁-X₂-X₃-X₄-Y₁-Y₂, Z₁-Z₂-Z₃-Z₄-X₁-X₂-Y₁-Y₂-Y₃, Z₁-Z₂-Z₃-Z₄-X₁-X₂-X₃-Y₁-Y₂-Y₃, Z₁-Z₂-Z₃-Z₄-X₁-X₂-X₃-X₄-Y₁-Y₂-Y₃, Z₁-Z₂-Z₃-Z₄-X₁-X₂-Y₁-Y₂-Y₃-Y₄, Z₁-Z₂-Z₃-Z₄-X₁-X₂-X₃-Y₁-Y₂-Y₃-Y₄, Z₁-Z₂-Z₃-Z₄-X₁-X₂-X₃-X₄-Y₁-Y₂-Y₃-Y₄, X₁-X₂-Y₁-Y₂-Z₁, X₁-X₂-X₃-Y₁-Y₂-Z₁, X₁-X₂-X₃-X₄-Y₁-Y₂-Z₁, X₁-X₂-Y₁-Y₂-Y₃-Z₁, X₁-X₂-X₃-Y₁-Y₂-Y₃-Z₁, X₁-X₂-X₃-X₄-Y₁-Y₂-Y₃-Z₁, X₁-X₂-Y₁-Y₂-Y₃-Y₄-Z₁, X₁-X₂-X₃-Y₁-Y₂-Y₃-Y₄-Z₁, X₁-X₂-X₃-X₄-Y₁-Y₂-Y₃-Y₄-Z₁, Z₁-X₁-X₂-Y₁-Y₂-Z₁, Z₁-X₁-X₂-X₃-Y₁-Y₂-Z₁, Z₁-X₁-X₂-X₃-X₄-Y₁-Y₂-Z₁, Z₁-X₁-X₂-Y₁-Y₂-Y₃-Z₁, Z₁-X₁-X₂-X₃-Y₁-Y₂-Y₃-Z₁, Z₁-X₁-X₂-X₃-X₄-Y₁-Y₂-Y₃-Z₁, Z₁-X₁-X₂-Y₁-Y₂-Y₃-Y₄-Z₁, Z₁-X₁-X₂-X₃-Y₁-Y₂-Y₃-Y₄-Z₁, Z₁-X₁-X₂-X₃-X₄-Y₁-Y₂-Y₃-Y₄-Z₁, Z₁-Z₂-X₁-X₂-Y₁-Y₂-Z₁, Z₁-Z₂-X₁-X₂-X₃-Y₁-Y₂-Z₁, Z₁-Z₂-X₁-X₂-X₃-X₄-Y₁-Y₂-Z₁, Z₁-Z₂-X₁-X₂-Y₁-Y₂-Y₃-Z₁, Z₁-Z₂-X₁-X₂-X₃-Y₁-Y₂-Y₃-Z₁, Z₁-Z₂-X₁-X₂-X₃-X₄-Y₁-Y₂-Y₃-Z₁, Z₁-Z₂-X₁-X₂-Y₁-Y₂-Y₃-Y₄-Z₁, Z₁-Z₂-X₁-X₂-X₃-Y₁-Y₂-Y₃-Y₄-Z₁, Z₁-Z₂-X₁-X₂-X₃-X₄-Y₁-Y₂-Y₃-Y₄-Z₁, Z₁-Z₂-Z₃-X₁-X₂-Y₁-Y₂-Z₁, Z₁-Z₂-Z₃-X₁-X₂-X₃-Y₁-Y₂-Z₁, Z₁-Z₂-Z₃-X₁-X₂-X₃-X₄-Y₁-Y₂-Z₁, Z₁-Z₂-Z₃-X₁-X₂-Y₁-Y₂-Y₃-Z₁, Z₁-Z₂-Z₃-X₁-X₂-X₃-Y₁-Y₂-Y₃-Z₁, Z₁-Z₂-Z₃-X₁-X₂-X₃-X₄-Y₁-Y₂-Y₃-Z₁, Z₁-Z₂-Z₃-X₁-X₂-Y₁-Y₂-Y₃-Y₄-Z₁, Z₁-Z₂-Z₃-X₁-X₂-X₃-Y₁-Y₂-Y₃-Y₄-Z₁, Z₁-Z₂-Z₃-X₁-X₂-X₃-X₄-Y₁-Y₂-Y₃-Y₄-Z₁, Z₁-Z₂-Z₃-Z₄-X₁-X₂-Y₁-Y₂-Z₁, Z₁-Z₂-Z₃-Z₄-X₁-X₂-X₃-Y₁-Y₂-Z₁, Z₁-Z₂-Z₃-Z₄-X₁-X₂-X₃-X₄-Y₁-Y₂-Z₁, Z₁-Z₂-Z₃-Z₄-X₁-X₂-Y₁-Y₂-Y₃-Z₁, Z₁-Z₂-Z₃-Z₄-X₁-X₂-X₃-Y₁-Y₂-Y₃-Z₁, Z₁-Z₂-Z₃-Z₄-X₁-X₂-X₃-X₄-Y₁-Y₂-Y₃-Z₁, Z₁-Z₂-Z₃-Z₄-X₁-X₂-Y₁-Y₂-Y₃-Y₄-Z₁, Z₁-Z₂-Z₃-Z₄-X₁-X₂-X₃-Y₁-Y₂-Y₃-Y₄-Z₁, Z₁-Z₂-Z₃-Z₄-X₁-X₂-X₃-X₄-Y₁-Y₂-Y₃-Y₄-Z₁, X₁-X₂-Y₁-Y₂-Z₁-Z₂, X₁-X₂-X₃-Y₁-Y₂-Z₁-Z₂, X₁-X₂-X₃-X₄-Y₁-Y₂-Z₁-Z₂, X₁-X₂-Y₁-Y₂-Y₃-Z₁-Z₂, X₁-X₂-X₃-Y₁-Y₂-Y₃-Z₁-Z₂, X₁-X₂-X₃-X₄-Y₁-Y₂-Y₃-Z₁-Z₂, X₁-X₂-Y₁-Y₂-Y₃-Y₄-Z₁-Z₂, X₁-X₂-X₃-Y₁-Y₂-Y₃-Y₄-Z₁-Z₂, X₁-X₂-X₃-X₄-Y₁-Y₂-Y₃-Y₄-Z₁-Z₂, Z₁-X₁-X₂-Y₁-Y₂-Z₁-Z₂, Z₁-X₁-X₂-X₃-Y₁-Y₂-Z₁-Z₂, Z₁-X₁-X₂-X₃-X₄-Y₁-Y₂-Z₁-Z₂, Z₁-X₁-X₂-Y₁-Y₂-Y₃—Z₁-Z₂, Z₁-X₁-X₂-X₃-Y₁-Y₂-Y₃-Z₁-Z₂, Z₁-X₁-X₂-X₃-X₄-Y₁-Y₂-Y₃-Z₁-Z₂, Z₁-X₁-X₂-Y₁-Y₂-Y₃-Y₄-Z₁-Z₂, Z₁-X₁-X₂-X₃-Y₁-Y₂-Y₃-Y₄-Z₁-Z₂, Z₁-X₁-X₂-X₃-X₄-Y₁-Y₂-Y₃-Y₄-Z₁-Z₂, Z₁-Z₂-X₁-X₂-Y₁-Y₂-Z₁-Z₂, Z₁-Z₂-X₁-X₂-X₃-Y₁-Y₂-Z₁-Z₂, Z₁-Z₂-X₁-X₂-X₃-X₄-Y₁-Y₂-Z₁-Z₂, Z₁-Z₂-X₁-X₂-Y₁-Y₂-Y₃-Z₁-Z₂, Z₁-Z₂-X₁-X₂-X₃-Y₁-Y₂-Y₃-Z₁-Z₂, Z₁-Z₂-X₁-X₂-X₃-X₄-Y₁-Y₂-Y₃-Z₁-Z₂, Z₁-Z₂-X₁-X₂-Y₁-Y₂-Y₃-Y₄-Z₁-Z₂, Z₁-Z₂-X₁-X₂-X₃-Y₁-Y₂-Y₃-Y₄-Z₁-Z₂, Z₁-Z₂-X₁-X₂-X₃-X₄-Y₁-Y₂-Y₃-Y₄-Z₁-Z₂, Z₁-Z₂-Z₃-X₁-X₂-Y₁-Y₂-Z₁-Z₂, Z₁-Z₂-Z₃-X₁-X₂-X₃-Y₁-Y₂-Z₁-Z₂, Z₁-Z₂-Z₃-X₁-X₂-X₃-X₄-Y₁-Y₂-Z₁-Z₂, Z₁-Z₂-Z₃-X₁-X₂-Y₁-Y₂-Y₃-Z₁-Z₂, Z₁-Z₂-Z₃-X₁-X₂-X₃-Y₁-Y₂-Y₃-Z₁-Z₂, Z₁-Z₂-Z₃-X₁-X₂-X₃-X₄-Y₁-Y₂-Y₃-Z₁-Z₂, Z₁-Z₂-Z₃-X₁-X₂-Y₁-Y₂-Y₃-Y₄-Z₁-Z₂, Z₁-Z₂-Z₃-X₁-X₂-X₃-Y₁-Y₂-Y₃-Y₄-Z₁-Z₂, Z₁-Z₂-Z₃-X₁-X₂-X₃-X₄-Y₁-Y₂-Y₃-Y₄-Z₁-Z₂, Z₁-Z₂-Z₃-Z₄-X₁-X₂-Y₁-Y₂-Z₁-Z₂, Z₁-Z₂-Z₃-Z₄-X₁-X₂-X₃-Y₁-Y₂-Z₁-Z₂, Z₁-Z₂-Z₃-Z₄-X₁-X₂-X₃-X₄-Y₁-Y₂-Z₁-Z₂, Z₁-Z₂-Z₃-Z₄-X₁-X₂-Y₁-Y₂-Y₃-Z₁-Z₂, Z₁-Z₂-Z₃-Z₄-X₁-X₂-X₃-Y₁-Y₂-Y₃-Z₁-Z₂, Z₁-Z₂-Z₃-Z₄-X₁-X₂-X₃-X₄-Y₁-Y₂-Y₃-Z₁-Z₂, Z₁-Z₂-Z₃-Z₄-X₁-X₂-Y₁-Y₂-Y₃-Y₄-Z₁-Z₂, Z₁-Z₂-Z₃-Z₄-X₁-X₂-X₃-Y₁-Y₂-Y₃-Y₄-Z₁-Z₂, Z₁-Z₂-Z₃-Z₄-X₁-X₂-X₃-X₄-Y₁-Y₂-Y₃-Y₄-Z₁-Z₂, X₁-X₂-Y₁-Y₂-Z₁-Z₂-Z₃, X₁-X₂-X₃-Y₁-Y₂-Z₁-Z₂-Z₃, X₁-X₂-X₃-X₄-Y₁-Y₂-Z₁-Z₂-Z₃, X₁-X₂-Y₁-Y₂-Y₃-Z₁-Z₂-Z₃, X₁-X₂-X₃-Y₁-Y₂-Y₃-Z₁-Z₂-Z₃, X₁-X₂-X₃-X₄-Y₁-Y₂-Y₃-Z₁-Z₂-Z₃, X₁-X₂-Y₁-Y₂-Y₃-Y₄-Z₁-Z₂-Z₃, X₁-X₂-X₃-Y₁-Y₂-Y₃-Y₄-Z₁-Z₂-Z₃, X₁-X₂-X₃-X₄-Y₁-Y₂-Y₃-Y₄-Z₁-Z₂-Z₃, Z₁-X₁-X₂-Y₁-Y₂-Z₁-Z₂-Z₃, Z₁-X₁-X₂-X₃-Y₁-Y₂-Z₁-Z₂-Z₃, Z₁-X₁-X₂-X₃-X₄-Y₁-Y₂-Z₁-Z₂-Z₃, Z₁-X₁-X₂-Y₁-Y₂-Y₃-Z₁-Z₂-Z₃, Z₁-X₁-X₂-X₃-Y₁-Y₂-Y₃-Z₁-Z₂-Z₃, Z₁-X₁-X₂-X₃-X₄-Y₁-Y₂-Y₃-Z₁-Z₂-Z₃, Z₁-X₁-X₂-Y₁-Y₂-Y₃-Y₄-Z₁-Z₂-Z₃, Z₁-X₁-X₂-X₃-Y₁-Y₂-Y₃-Y₄-Z₁-Z₂-Z₃, Z₁-X₁-X₂-X₃-X₄-Y₁-Y₂-Y₃-Y₄-Z₁-Z₂-Z₃, Z₁-Z₂-X₁-X₂-Y₁-Y₂-Z₁-Z₂-Z₃, Z₁-Z₂-X₁-X₂-X₃-Y₁-Y₂-Z₁-Z₂-Z₃, Z₁-Z₂-X₁-X₂-X₃-X₄-Y₁-Y₂-Z₁-Z₂-Z₃, Z₁-Z₂-X₁-X₂-Y₁-Y₂-Y₃-Z₁-Z₂-Z₃, Z₁-Z₂-X₁-X₂-X₃-Y₁-Y₂-Y₃-Z₁-Z₂-Z₃, Z₁-Z₂-X₁-X₂-X₃-X₄-Y₁-Y₂-Y₃-Z₁-Z₂-Z₃, Z₁-Z₂-X₁-X₂-Y₁-Y₂-Y₃-Y₄-Z₁-Z₂-Z₃, Z₁-Z₂-X₁-X₂-X₃-Y₁-Y₂-Y₃-Y₄-Z₁-Z₂-Z₃, Z₁-Z₂-X₁-X₂-X₃-X₄-Y₁-Y₂-Y₃-Y₄-Z₁-Z₂-Z₃, Z₁-Z₂-Z₃-X₁-X₂-Y₁-Y₂-Z₁-Z₂-Z₃, Z₁-Z₂-Z₃-X₁-X₂-X₃-Y₁-Y₂-Z₁-Z₂-Z₃, Z₁-Z₂-Z₃-X₁-X₂-X₃-X₄-Y₁-Y₂-Z₁-Z₂-Z₃, Z₁-Z₂-Z₃-X₁-X₂-Y₁-Y₂-Y₃-Z₁-Z₂-Z₃, Z₁-Z₂-Z₃-X₁-X₂-X₃-Y₁-Y₂-Y₃-Z₁-Z₂-Z₃, Z₁-Z₂-Z₃-X₁-X₂-X₃-X₄—Y₁-Y₂-Y₃-Z₁-Z₂-Z₃, Z₁-Z₂-Z₃-X₁-X₂-Y₁-Y₂-Y₃-Y₄-Z₁-Z₂-Z₃, Z₁-Z₂-Z₃-X₁-X₂-X₃-Y₁-Y₂-Y₃-Y₄-Z₁-Z₂-Z₃, Z₁-Z₂-Z₃-X₁-X₂-X₃-X₄-Y₁-Y₂-Y₃-Y₄-Z₁-Z₂-Z₃, Z₁-Z₂-Z₃-Z₄-X₁-X₂-Y₁-Y₂-Z₁-Z₂-Z₃, Z₁-Z₂-Z₃-Z₄-X₁-X₂-X₃-Y₁-Y₂-Z₁-Z₂-Z₃, Z₁-Z₂-Z₃-Z₄-X₁-X₂-X₃-X₄-Y₁-Y₂-Z₁-Z₂-Z₃, Z₁-Z₂-Z₃-Z₄-X₁-X₂-Y₁-Y₂-Y₃-Z₁-Z₂-Z₃, Z₁-Z₂-Z₃-Z₄-X₁-X₂-X₃-Y₁-Y₂-Y₃-Z₁-Z₂-Z₃, Z₁-Z₂-Z₃-Z₄-X₁-X₂-X₃-X₄-Y₁-Y₂-Y₃-Z₁-Z₂-Z₃, Z₁-Z₂-Z₃-Z₄-X₁-X₂-Y₁-Y₂-Y₃-Y₄-Z₁-Z₂-Z₃, Z₁-Z₂-Z₃-Z₄-X₁-X₂-X₃-Y₁-Y₂-Y₃-Y₄-Z₁-Z₂-Z₃, Z₁-Z₂-Z₃-Z₄-X₁-X₂-X₃-X₄-Y₁-Y₂-Y₃-Y₄-Z₁-Z₂-Z₃, X₁-X₂-Y₁-Y₂-Z₁-Z₂-Z₃-Z₄, X₁-X₂-X₃-Y₁-Y₂-Z₁-Z₂-Z₃-Z₄, X₁-X₂-X₃-X₄-Y₁-Y₂-Z₁-Z₂-Z₃-Z₄, X₁-X₂-Y₁-Y₂-Y₃-Z₁-Z₂-Z₃-Z₄, X₁-X₂-X₃-Y₁-Y₂-Y₃-Z₁-Z₂-Z₃-Z₄, X₁-X₂-X₃-X₄-Y₁-Y₂-Y₃-Z₁-Z₂-Z₃-Z₄, X₁-X₂-Y₁-Y₂-Y₃-Y₄-Z₁-Z₂-Z₃-Z₄, X₁-X₂-X₃-Y₁-Y₂-Y₃-Y₄-Z₁-Z₂-Z₃-Z₄, X₁-X₂-X₃-X₄-Y₁-Y₂-Y₃-Y₄-Z₁-Z₂-Z₃-Z₄, Z₁-X₁-X₂-Y₁-Y₂-Z₁-Z₂-Z₃-Z₄, Z₁-X₁-X₂-X₃-Y₁-Y₂-Z₁-Z₂-Z₃-Z₄, Z₁-X₁-X₂-X₃-X₄-Y₁-Y₂-Z₁-Z₂-Z₃-Z₄, Z₁-X₁-X₂-Y₁-Y₂-Y₃-Z₁-Z₂-Z₃-Z₄, Z₁-X₁-X₂-X₃-Y₁-Y₂-Y₃-Z₁-Z₂-Z₃-Z₄, Z₁-X₁-X₂-X₃-X₄-Y₁-Y₂-Y₃-Z₁-Z₂-Z₃-Z₄, Z₁-X₁-X₂-Y₁-Y₂-Y₃-Y₄-Z₁-Z₂-Z₃-Z₄, Z₁-X₁-X₂-X₃-Y₁-Y₂-Y₃-Y₄-Z₁-Z₂-Z₃-Z₄, Z₁-X₁-X₂-X₃-X₄-Y₁-Y₂-Y₃-Y₄-Z₁-Z₂-Z₃-Z₄, Z₁-Z₂-X₁-X₂-Y₁-Y₂-Z₁-Z₂-Z₃-Z₄, Z₁-Z₂-X₁-X₂-X₃-Y₁-Y₂-Z₁-Z₂-Z₃-Z₄, Z₁-Z₂-X₁-X₂-X₃-X₄-Y₁-Y₂-Z₁-Z₂-Z₃-Z₄, Z₁-Z₂-X₁-X₂-Y₁-Y₂-Y₃-Z₁-Z₂-Z₃-Z₄, Z₁-Z₂-X₁-X₂-X₃-Y₁-Y₂-Y₃-Z₁-Z₂-Z₃-Z₄, Z₁-Z₂-X₁-X₂-X₃-X₄-Y₁-Y₂-Y₃-Z₁-Z₂-Z₃-Z₄, Z₁-Z₂-X₁-X₂-Y₁-Y₂-Y₃-Y₄-Z₁-Z₂-Z₃-Z₄, Z₁-Z₂-X₁-X₂-X₃-Y₁-Y₂-Y₃-Y₄-Z₁-Z₂-Z₃-Z₄, Z₁-Z₂-X₁-X₂-X₃-X₄-Y₁-Y₂-Y₃-Y₄—Z₁-Z₂-Z₃-Z₄, Z₁-Z₂-Z₃-X₁-X₂-Y₁-Y₂-Z₁-Z₂-Z₃-Z₄, Z₁-Z₂-Z₃-X₁-X₂-X₃-Y₁-Y₂-Z₁-Z₂-Z₃-Z₄, Z₁-Z₂-Z₃-X₁-X₂-X₃-X₄-Y₁-Y₂-Z₁-Z₂-Z₃-Z₄, Z₁-Z₂-Z₃-X₁-X₂-Y₁-Y₂-Y₃-Z₁-Z₂-Z₃-Z₄, Z₁-Z₂-Z₃-X₁-X₂-X₃-Y₁-Y₂-Y₃-Z₁-Z₂-Z₃-Z₄, Z₁-Z₂-Z₃-X₁-X₂-X₃-X₄-Y₁-Y₂-Y₃-Z₁-Z₂-Z₃-Z₄, Z₁-Z₂-Z₃-X₁-X₂-Y₁-Y₂-Y₃-Y₄-Z₁-Z₂-Z₃-Z₄, Z₁-Z₂-Z₃-X₁-X₂-X₃-Y₁-Y₂-Y₃-Y₄-Z₁-Z₂-Z₃-Z₄, Z₁-Z₂-Z₃-X₁-X₂-X₃-X₄-Y₁-Y₂-Y₃-Y₄-Z₁-Z₂-Z₃-Z₄, Z₁-Z₂-Z₃-Z₄-X₁-X₂-Y₁-Y₂-Z₁-Z₂-Z₃-Z₄, Z₁-Z₂-Z₃-Z₄-X₁-X₂-X₃-Y₁-Y₂-Z₁-Z₂-Z₃-Z₄, Z₁-Z₂-Z₃-Z₄-X₁-X₂-X₃-X₄-Y₁-Y₂-Z₁-Z₂-Z₃-Z₄, Z₁-Z₂-Z₃-Z₄-X₁-X₂-Y₁-Y₂-Y₃-Z₁-Z₂-Z₃-Z₄, Z₁-Z₂-Z₃-Z₄-X₁-X₂-X₃-Y₁-Y₂-Y₃-Z₁-Z₂-Z₃-Z₄, Z₁-Z₂-Z₃-Z₄-X₁-X₂-X₃-X₄-Y₁-Y₂-Y₃-Z₁-Z₂-Z₃-Z₄, Z₁-Z₂-Z₃-Z₄-X₁-X₂-Y₁-Y₂-Y₃-Y₄-Z₁-Z₂-Z₃-Z₄, Z₁-Z₂-Z₃-Z₄-X₁-X₂-X₃-Y₁-Y₂-Y₃-Y₄-Z₁-Z₂-Z₃-Z₄, Z₁-Z₂-Z₃-Z₄-X₁-X₂-X₃-X₄-Y₁-Y₂-Y₃-Y₄-Z₁-Z₂-Z₃-Z₄, Z₁-Y₁-Y₂-X₁-X₂, Z₁-Y₁-Y₂-X₁-X₂-X₃, Z₁-Y₁-Y₂-X₁-X₂-X₃-X₄, Z₁-Y₁-Y₂-Y₃-X₁-X₂, Z₁-Y₁-Y₂-Y₃-X₁-X₂-X₃, Z₁-Y₁-Y₂-Y₃-X₁-X₂-X₃-X₄, Z₁-Y₁-Y₂-Y₃-Y₄-X₁-X₂, Z₁-Y₁-Y₂-Y₃-Y₄-X₁-X₂-X₃, Z₁-Y₁-Y₂-Y₃-Y₄-X₁-X₂-X₃-X₄, Z₁-Z₂-Y₁-Y₂-X₁-X₂, Z₁-Z₂-Y₁-Y₂-X₁-X₂-X₃, Z₁-Z₂-Y₁-Y₂-X₁-X₂-X₃-X₄, Z₁-Z₂-Y₁-Y₂-Y₃-X₁-X₂, Z₁-Z₂-Y₁-Y₂-Y₃-X₁-X₂-X₃, Z₁-Z₂-Y₁-Y₂-Y₃-X₁-X₂-X₃-X₄, Z₁-Z₂-Y₁-Y₂-Y₃-Y₄-X₁-X₂, Z₁-Z₂-Y₁-Y₂-Y₃-Y₄-X₁-X₂-X₃, Z₁-Z₂-Y₁-Y₂-Y₃-Y₄-X₁-X₂-X₃-X₄, Z₁-Z₂-Z₃-Y₁-Y₂-X₁-X₂, Z₁-Z₂-Z₃-Y₁-Y₂-X₁-X₂-X₃, Z₁-Z₂-Z₃-Y₁-Y₂-X₁-X₂-X₃-X₄, Z₁-Z₂-Z₃-Y₁-Y₂-Y₃-X₁-X₂, Z₁-Z₂-Z₃-Y₁-Y₂-Y₃-X₁-X₂-X₃, Z₁-Z₂-Z₃-Y₁-Y₂-Y₃-X₁-X₂-X₃-X₄, Z₁-Z₂-Z₃-Y₁-Y₂-Y₃-Y₄-X₁-X₂, Z₁-Z₂-Z₃-Y₁-Y₂-Y₃-Y₄-X₁-X₂-X₃, Z₁-Z₂-Z₃-Y₁-Y₂-Y₃-Y₄-X₁-X₂-X₃-X₄, Z₁-Z₂-Z₃-Z₄-Y₁-Y₂-X₁-X₂, Z₁-Z₂-Z₃-Z₄-Y₁-Y₂-X₁-X₂-X₃, Z₁-Z₂-Z₃-Z₄—Y₁-Y₂-X₁-X₂-X₃-X₄, Z₁-Z₂-Z₃-Z₄-Y₁-Y₂-Y₃-X₁-X₂, Z₁-Z₂-Z₃-Z₄-Y₁-Y₂-Y₃-X₁-X₂-X₃, Z₁-Z₂-Z₃-Z₄-Y₁-Y₂-Y₃-X₁-X₂-X₃-X₄, Z₁-Z₂-Z₃-Z₄-Y₁-Y₂-Y₃-Y₄-X₁-X₂, Z₁-Z₂-Z₃-Z₄-Y₁-Y₂-Y₃-Y₄-X₁-X₂-X₃, Z₁-Z₂-Z₃-Z₄-Y₁-Y₂-Y₃-Y₄-X₁-X₂-X₃-X₄, Y₁-Y₂-X₁-X₂-Z₁, Y₁-Y₂-X₁-X₂-X₃-Z₁, Y₁-Y₂-X₁-X₂-X₃-X₄-Z₁, Y₁-Y₂-Y₃-X₁-X₂-Z₁, Y₁-Y₂-Y₃-X₁-X₂-X₃-Z₁, Y₁-Y₂-Y₃-X₁-X₂-X₃-X₄-Z₁, Y₁-Y₂-Y₃-Y₄-X₁-X₂-Z₁, Y₁-Y₂-Y₃-Y₄-X₁-X₂-X₃-Z₁, Y₁-Y₂-Y₃-Y₄-X₁-X₂-X₃-X₄-Z₁, Z₁-Y₁-Y₂-X₁-X₂-Z₁, Z₁-Y₁-Y₂-X₁-X₂-X₃-Z₁, Z₁-Y₁-Y₂-X₁-X₂-X₃-X₄-Z₁, Z₁-Y₁-Y₂-Y₃-X₁-X₂-Z₁, Z₁-Y₁-Y₂-Y₃-X₁-X₂-X₃-Z₁, Z₁-Y₁-Y₂-Y₃-X₁-X₂-X₃-X₄-Z₁, Z₁-Y₁-Y₂-Y₃-Y₄-X₁-X₂-Z₁, Z₁-Y₁-Y₂-Y₃-Y₄-X₁-X₂-X₃-Z₁, Z₁-Y₁-Y₂-Y₃-Y₄-X₁-X₂-X₃-X₄-Z₁, Z₁-Z₂-Y₁-Y₂-X₁-X₂-Z₁, Z₁-Z₂-Y₁-Y₂-X₁-X₂-X₃-Z₁, Z₁-Z₂-Y₁-Y₂-X₁-X₂-X₃-X₄-Z₁, Z₁-Z₂-Y₁-Y₂-Y₃-X₁-X₂-Z₁, Z₁-Z₂-Y₁-Y₂-Y₃-X₁-X₂-X₃-Z₁, Z₁-Z₂-Y₁-Y₂-Y₃-X₁-X₂-X₃-X₄-Z₁, Z₁-Z₂-Y₁-Y₂-Y₃-Y₄-X₁-X₂-Z₁, Z₁-Z₂-Y₁-Y₂-Y₃-Y₄-X₁-X₂-X₃-Z₁, Z₁-Z₂-Y₁-Y₂-Y₃-Y₄-X₁-X₂-X₃-X₄-Z₁, Z₁-Z₂-Z₃-Y₁-Y₂-X₁-X₂-Z₁, Z₁-Z₂-Z₃-Y₁-Y₂-X₁-X₂-X₃-Z₁, Z₁-Z₂-Z₃-Y₁-Y₂-X₁-X₂-X₃-X₄-Z₁, Z₁-Z₂-Z₃-Y₁-Y₂-Y₃-X₁-X₂-Z₁, Z₁-Z₂-Z₃-Y₁-Y₂-Y₃-X₁-X₂-X₃-Z₁, Z₁-Z₂-Z₃-Y₁-Y₂-Y₃-X₁-X₂-X₃-X₄-Z₁, Z₁-Z₂-Z₃-Y₁-Y₂-Y₃-Y₄-X₁-X₂-Z₁, Z₁-Z₂-Z₃-Y₁-Y₂-Y₃-Y₄-X₁-X₂-X₃-Z₁, Z₁-Z₂-Z₃-Y₁-Y₂-Y₃-Y₄-X₁-X₂-X₃-X₄-Z₁, Z₁-Z₂-Z₃-Z₄-Y₁-Y₂-X₁-X₂-Z₁, Z₁-Z₂-Z₃-Z₄-Y₁-Y₂-X₁-X₂-X₃-Z₁, Z₁-Z₂-Z₃-Z₄-Y₁-Y₂-X₁-X₂-X₃-X₄-Z₁, Z₁-Z₂-Z₃-Z₄-Y₁-Y₂-Y₃-X₁-X₂-Z₁, Z₁-Z₂-Z₃-Z₄-Y₁-Y₂-Y₃-X₁-X₂-X₃-Z₁, Z₁-Z₂-Z₃-Z₄-Y₁-Y₂-Y₃-X₁-X₂-X₃-X₄-Z₁, Z₁-Z₂-Z₃-Z₄-Y₁-Y₂-Y₃-Y₄-X₁-X₂-Z₁, Z₁-Z₂-Z₃-Z₄-Y₁-Y₂-Y₃-Y₄-X₁-X₂-X₃-Z₁, Z₁-Z₂-Z₃-Z₄-Y₁-Y₂-Y₃-Y₄-X₁-X₂-X₃-X₄-Z₁, Y₁-Y₂-X₁-X₂-Z₁-Z₂, Y₁-Y₂-X₁-X₂-X₃-Z₁-Z₂, Y₁-Y₂-X₁-X₂-X₃-X₄-Z₁-Z₂, Y₁-Y₂-Y₃-X₁-X₂-Z₁-Z₂, Y₁-Y₂-Y₃-X₁-X₂-X₃-Z₁-Z₂, Y₁-Y₂-Y₃-X₁-X₂-X₃-X₄-Z₁-Z₂, Y₁-Y₂-Y₃-Y₄-X₁-X₂-Z₁-Z₂, Y₁-Y₂-Y₃-Y₄-X₁-X₂-X₃-Z₁-Z₂, Y₁-Y₂-Y₃-Y₄-X₁-X₂-X₃-X₄-Z₁-Z₂, Z₁-Y₁-Y₂-X₁-X₂-Z₁-Z₂, Z₁-Y₁-Y₂-X₁-X₂-X₃-Z₁-Z₂, Z₁-Y₁-Y₂-X₁-X₂-X₃-X₄-Z₁-Z₂, Z₁-Y₁-Y₂-Y₃-X₁-X₂-Z₁-Z₂, Z₁-Y₁-Y₂-Y₃-X₁-X₂-X₃-Z₁-Z₂, Z₁-Y₁-Y₂-Y₃-X₁-X₂-X₃-X₄-Z₁-Z₂, Z₁-Y₁-Y₂-Y₃-Y₄-X₁-X₂-Z₁-Z₂, Z₁-Y₁-Y₂-Y₃-Y₄-X₁-X₂-X₃-Z₁-Z₂, Z₁-Y₁-Y₂-Y₃-Y₄-X₁-X₂-X₃-X₄-Z₁-Z₂, Z₁-Z₂-Y₁-Y₂-X₁-X₂-Z₁-Z₂, Z₁-Z₂-Y₁-Y₂-X₁-X₂-X₃-Z₁-Z₂, Z₁-Z₂-Y₁-Y₂-X₁-X₂-X₃-X₄-Z₁-Z₂, Z₁-Z₂-Y₁-Y₂-Y₃-X₁-X₂-Z₁-Z₂, Z₁-Z₂-Y₁-Y₂-Y₃-X₁-X₂-X₃-Z₁-Z₂, Z₁-Z₂-Y₁-Y₂-Y₃-X₁-X₂-X₃-X₄-Z₁-Z₂, Z₁-Z₂-Y₁-Y₂-Y₃-Y₄-X₁-X₂-Z₁-Z₂, Z₁-Z₂-Y₁-Y₂-Y₃-Y₄-X₁-X₂-X₃-Z₁-Z₂, Z₁-Z₂-Y₁-Y₂-Y₃-Y₄-X₁-X₂-X₃-X₄-Z₁-Z₂, Z₁-Z₂-Z₃-Y₁-Y₂-X₁-X₂-Z₁-Z₂, Z₁-Z₂-Z₃-Y₁-Y₂-X₁-X₂-X₃-Z₁-Z₂, Z₁-Z₂-Z₃-Y₁-Y₂-X₁-X₂-X₃-X₄-Z₁-Z₂, Z₁-Z₂-Z₃-Y₁-Y₂-Y₃-X₁-X₂-Z₁-Z₂, Z₁-Z₂-Z₃-Y₁-Y₂-Y₃-X₁-X₂-X₃-Z₁-Z₂, Z₁-Z₂-Z₃-Y₁-Y₂-Y₃-X₁-X₂-X₃-X₄-Z₁-Z₂, Z₁-Z₂-Z₃-Y₁-Y₂-Y₃-Y₄-X₁-X₂-Z₁-Z₂, Z₁-Z₂-Z₃-Y₁-Y₂-Y₃-Y₄-X₁-X₂-X₃-Z₁-Z₂, Z₁-Z₂-Z₃-Y₁-Y₂-Y₃-Y₄-X₁-X₂-X₃-X₄-Z₁-Z₂, Z₁-Z₂-Z₃-Z₄-Y₁-Y₂-X₁-X₂-Z₁-Z₂, Z₁-Z₂-Z₃-Z₄-Y₁-Y₂-X₁-X₂-X₃-Z₁-Z₂, Z₁-Z₂-Z₃-Z₄-Y₁-Y₂-X₁-X₂-X₃-X₄-Z₁-Z₂, Z₁-Z₂-Z₃-Z₄-Y₁-Y₂-Y₃-X₁-X₂-Z₁-Z₂, Z₁-Z₂-Z₃-Z₄-Y₁-Y₂-Y₃-X₁-X₂-X₃-Z₁-Z₂, Z₁-Z₂-Z₃-Z₄-Y₁-Y₂-Y₃-X₁-X₂-X₃-X₄-Z₁-Z₂, Z₁-Z₂-Z₃-Z₄-Y₁-Y₂-Y₃-Y₄-X₁-X₂-Z₁-Z₂, Z₁-Z₂-Z₃-Z₄-Y₁-Y₂-Y₃-Y₄-X₁-X₂-X₃-Z₁-Z₂, Z₁-Z₂-Z₃-Z₄-Y₁-Y₂-Y₃-Y₄-X₁-X₂-X₃-X₄-Z₁-Z₂, Y₁-Y₂-X₁-X₂-Z₁-Z₂-Z₃, Y₁-Y₂-X₁-X₂-X₃-Z₁-Z₂-Z₃, Y₁-Y₂-X₁-X₂-X₃-X₄-Z₁-Z₂-Z₃, Y₁-Y₂-Y₃-X₁-X₂-Z₁-Z₂-Z₃, Y₁-Y₂-Y₃-X₁-X₂-X₃-Z₁-Z₂-Z₃, Y₁-Y₂-Y₃-X₁-X₂-X₃-X₄-Z₁-Z₂-Z₃, Y₁-Y₂-Y₃-Y₄-X₁-X₂-Z₁-Z₂-Z₃, Y₁-Y₂-Y₃-Y₄-X₁-X₂-X₃-Z₁-Z₂-Z₃, Y₁-Y₂-Y₃-Y₄-X₁-X₂-X₃-X₄-Z₁-Z₂-Z₃, Z₁-Y₁-Y₂-X₁-X₂-Z₁-Z₂-Z₃, Z₁-Y₁-Y₂-X₁-X₂-X₃-Z₁-Z₂-Z₃, Z₁-Y₁-Y₂-X₁-X₂-X₃-X₄-Z₁-Z₂-Z₃, Z₁-Y₁-Y₂-Y₃-X₁-X₂-Z₁-Z₂-Z₃, Z₁-Y₁-Y₂-Y₃-X₁-X₂-X₃-Z₁-Z₂-Z₃, Z₁-Y₁-Y₂-Y₃-X₁-X₂-X₃-X₄-Z₁-Z₂-Z₃, Z₁-Y₁-Y₂-Y₃-Y₄-X₁-X₂-Z₁-Z₂-Z₃, Z₁-Y₁-Y₂-Y₃-Y₄-X₁-X₂-X₃-Z₁-Z₂-Z₃, Z₁-Y₁-Y₂-Y₃-Y₄-X₁-X₂-X₃-X₄-Z₁-Z₂-Z₃, Z₁-Z₂-Y₁-Y₂-X₁-X₂-X₃-Z₁-Z₂-3, Z₁-Z₂-Y₁-Y₂-X₁-X₂-X₃-X₄-Z₁-Z₂-Z₃, Z₁-Z₂-Y₁-Y₂-Y₃-X₁-X₂-Z₁-Z₂-Z₃, Z₁-Z₂-Y₁-Y₂-Y₃-X₁-X₂-X₃-Z₁-Z₂-Z₃, Z₁-Z₂-Y₁-Y₂-Y₃-X₁-X₂-X₃-X₄-Z₁-Z₂-Z₃, Z₁-Z₂-Y₁-Y₂-Y₃-Y₄-X₁-X₂-Z₁-Z₂-Z₃, Z₁-Z₂-Y₁-Y₂-Y₃-Y₄-X₁-X₂-X₃-Z₁-Z₂-Z₃, Z₁-Z₂-Y₁-Y₂-Y₃-Y₄-X₁-X₂-X₃-X₄-Z₁-Z₂-Z₃, Z₁-Z₂-Z₃-Y₁-Y₂-X₁-X₂-Z₁-Z₂-Z₃, Z₁-Z₂-Z₃-Y₁-Y₂-X₁-X₂-X₃-Z₁-Z₂-Z₃, Z₁-Z₂-Z₃-Y₁-Y₂-X₁-X₂-X₃-X₄-Z₁-Z₂-Z₃, Z₁-Z₂-Z₃-Y₁-Y₂-Y₃-X₁-X₂-Z₁-Z₂-Z₃, Z₁-Z₂-Z₃-Y₁-Y₂-Y₃-X₁-X₂-X₃-Z₁-Z₂-Z₃, Z₁-Z₂-Z₃-Y₁-Y₂-Y₃-X₁-X₂-X₃-X₄-Z₁-Z₂-Z₃, Z₁-Z₂-Z₃-Y₁-Y₂-Y₃-Y₄-X₁-X₂-Z₁-Z₂-Z₃, Z₁-Z₂-Z₃-Y₁-Y₂-Y₃-Y₄-X₁-X₂-X₃-Z₁-Z₂-Z₃, Z₁-Z₂-Z₃-Y₁-Y₂-Y₃-Y₄-X₁-X₂-X₃-X₄-Z₁-Z₂-Z₃, Z₁-Z₂-Z₃-Z₄-Y₁-Y₂-X₁-X₂-Z₁-Z₂-Z₃, Z₁-Z₂-Z₃-Z₄-Y₁-Y₂-X₁-X₂-X₃-Z₁-Z₂-Z₃, Z₁-Z₂-Z₃-Z₄-Y₁-Y₂-X₁-X₂-X₃-X₄-Z₁-Z₂-Z₃, Z₁-Z₂-Z₃-Z₄-Y₁-Y₂-Y₃-X₁-X₂-Z₁-Z₂-Z₃, Z₁-Z₂-Z₃-Z₄—Y₁-Y₂-Y₃-X₁-X₂-X₃-Z₁-Z₂-Z₃, Z₁-Z₂-Z₃-Z₄-Y₁-Y₂-Y₃-X₁-X₂-X₃-X₄-Z₁-Z₂-Z₃, Z₁-Z₂-Z₃-Z₄-Y₁-Y₂-Y₃-Y₄-X₁-X₂-X₃-Z₁-Z₂-Z₃, Z₁-Z₂-Z₃-Z₄-Y₁-Y₂-Y₃-Y₄-X₁-X₂-X₃-Z₁-Z₂-Z₃, Z₁-Z₂-Z₃-Z₄-Y₁-Y₂-Y₃-Y₄-X₁-X₂-X₃-X₄-Z₁-Z₂-Z₃, Y₁-Y₂-X₁-X₂-Z₁-Z₂-Z₃-Z₄, Y₁-Y₂-X₁-X₂-X₃-Z₁-Z₂-Z₃-Z₄, Y₁-Y₂-X₁-X₂-X₃-X₄-Z₁-Z₂-Z₃-Z₄, Y₁-Y₂-Y₃-X₁-X₂-Z₁-Z₂-Z₃-Z₄, Y₁-Y₂-Y₃-X₁-X₂-X₃-Z₁-Z₂-Z₃-Z₄, Y₁-Y₂-Y₃-X₁-X₂-X₃-X₄-Z₁-Z₂-Z₃-Z₄, Y₁-Y₂-Y₃-Y₄-X₁-X₂-Z₁-Z₂-Z₃-Z₄, Y₁-Y₂-Y₃-Y₄-X₁-X₂-X₃-Z₁-Z₂-Z₃-Z₄, Y₁-Y₂-Y₃-Y₄-X₁-X₂-X₃-X₄-Z₁-Z₂-Z₃-Z₄, Z₁-Y₁-Y₂-X₁-X₂-Z₁-Z₂-Z₃-Z₄, Z₁-Y₁-Y₂-X₁-X₂-X₃-Z₁-Z₂-Z₃-Z₄, Z₁-Y₁-Y₂-X₁-X₂-X₃-X₄-Z₁-Z₂-Z₃-Z₄, Z₁-Y₁-Y₂-Y₃-X₁-X₂-Z₁-Z₂-Z₃-Z₄, Z₁-Y₁-Y₂-Y₃-X₁-X₂-X₃-Z₁-Z₂-Z₃-Z₄, Z₁-Y₁-Y₂-Y₃-X₁-X₂-X₃-X₄-Z₁-Z₂-Z₃-Z₄, Z₁-Y₁-Y₂-Y₃-Y₄-X₁-X₂-Z₁-Z₂-Z₃-Z₄, Z₁-Y₁-Y₂-Y₃-Y₄-X₁-X₂-X₃-Z₁-Z₂-Z₃-Z₄, Z₁-Y₁-Y₂-Y₃-Y₄-X₁-X₂-X₃-X₄-Z₁-Z₂-Z₃-Z₄, Z₁-Z₂-Y₁-Y₂-X₁-X₂-Z₁-Z₂-Z₃-Z₄, Z₁-Z₂-Y₁-Y₂-X₁-X₂-X₃-Z₁-Z₂-Z₃-Z₄, Z₁-Z₂-Y₁-Y₂-X₁-X₂-X₃-X₄-Z₁-Z₂-Z₃-Z₄, Z₁-Z₂-Y₁-Y₂-Y₃-X₁-X₂-Z₁-Z₂-Z₃-Z₄, Z₁-Z₂-Y₁-Y₂-Y₃-X₁-X₂-X₃-Z₁-Z₂-Z₃-Z₄, Z₁-Z₂-Y₁-Y₂-Y₃-X₁-X₂-X₃-X₄-Z₁-Z₂-Z₃-Z₄, Z₁-Z₂-Y₁-Y₂-Y₃-Y₄-X₁-X₂-Z₁-Z₂-Z₃-Z₄, Z₁-Z₂-Y₁-Y₂-Y₃-Y₄-X₁-X₂-X₃-Z₁-Z₂-Z₃-Z₄, Z₁-Z₂-Y₁-Y₂-Y₃-Y₄-X₁-X₂-X₃-X₄-Z₁-Z₂-Z₃-Z₄, Z₁-Z₂-Z₃-Y₁-Y₂-X₁-X₂-Z₁-Z₂-Z₃-Z₄, Z₁-Z₂-Z₃-Y₁-Y₂-X₁-X₂-X₃-Z₁-Z₂-Z₃-Z₄, Z₁-Z₂-Z₃-Y₁-Y₂-X₁-X₂-X₃-X₄-Z₁-Z₂-Z₃-Z₄, Z₁-Z₂-Z₃-Y₁-Y₂-Y₃-X₁-X₂-Z₁-Z₂-Z₃-Z₄, Z₁-Z₂-Z₃-Y₁-Y₂-Y₃-X₁-X₂-X₃-Z₁-Z₂-Z₃-Z₄, Z₁-Z₂-Z₃-Y₁-Y₂-Y₃-X₁-X₂-X₃-X₄-Z₁-Z₂-Z₃-Z₄, Z₁-Z₂-Z₃-Y₁-Y₂-Y₃-Y₄-X₁-X₂-Z₁-Z₂-Z₃-Z₄, Z₁-Z₂-Z₃-Y₁-Y₂-Y₃-Y₄-X₁-X₂-X₃-Z₁-Z₂-Z₃-Z₄, Z₁-Z₂-Z₃-Y₁-Y₂-Y₃-Y₄-X₁-X₂-X₃-X₄-Z₁-Z₂-Z₃-Z₄, Z₁-Z₂-Z₃-Z₄-Y₁-Y₂-X₁-X₂-Z₁-Z₂-Z₃-Z₄, Z₁-Z₂-Z₃-Z₄-Y₁-Y₂-X₁-X₂-X₃-Z₁-Z₂-Z₃-Z₄, Z₁-Z₂-Z₃-Z₄-Y₁-Y₂-X₁-X₂-X₃-X₄-Z₁-Z₂-Z₃-Z₄, Z₁-Z₂-Z₃-Z₄-Y₁-Y₂-Y₃-X₁-X₂-Z₁-Z₂-Z₃-Z₄, Z₁-Z₂-Z₃-Z₄-Y₁-Y₂-Y₃-X₁-X₂-X₃-Z₁-Z₂-Z₃-Z₄, Z₁-Z₂-Z₃-Z₄-Y₁-Y₂-Y₃-X₁-X₂-X₃-X₄-Z₁-Z₂-Z₃-Z₄, Z₁-Z₂-Z₃-Z₄-Y₁-Y₂-Y₃-Y₄-X₁-X₂-Z₁-Z₂-Z₃-Z₄, Z₁-Z₂-Z₃-Z₄-Y₁-Y₂-Y₃-Y₄-X₁-X₂-X₃-Z₁-Z₂-Z₃-Z₄, Z₁-Z₂-Z₃-Z₄-Y₁-Y₂-Y₃-Y₄-X₁-X₂-X₃-X₄-Z₁-Z₂-Z₃-Z₄, Z₁-X₁-X₂-Y₁-Y₂, Z₁-X₁-X₂-X₃-Y₁-Y₂, Z₁-X₁-X₂-X₃-X₄-Y₁-Y₂, Z₁-X₁-X₂-Y₁-Y₂-Y₃, Z₁-X₁-X₂-X₃-Y₁-Y₂-Y₃, Z₁-X₁-X₂-X₃-X₄-Y₁-Y₂-Y₃, Z₁-X₁-X₂-Y₁-Y₂-Y₃-Y₄, Z₁-X₁-X₂-X₃-Y₁-Y₂-Y₃-Y₄, Z₁-X₁-X₂-X₃-X₄-Y₁-Y₂-Y₃-Y₄, Z₁-Z₂-X₁-X₂-Y₁-Y₂, Z₁-Z₂-X₁-X₂-X₃-Y₁-Y₂, Z₁-Z₂-X₁-X₂-X₃-X₄-Y₁-Y₂, Z₁-Z₂-X₁-X₂-Y₁-Y₂-Y₃, Z₁-Z₂-X₁-X₂-X₃-Y₁-Y₂-Y₃, Z₁-Z₂-X₁-X₂-X₃-X₄-Y₁-Y₂-Y₃, Z₁-Z₂-X₁-X₂-Y₁-Y₂-Y₃-Y₄, Z₁-Z₂-X₁-X₂-X₃-Y₁-Y₂-Y₃-Y₄, Z₁-Z₂-X₁-X₂-X₃-X₄-Y₁-Y₂-Y₃-Y₄, Z₁-Z₂-Z₃-X₁-X₂-Y₁-Y₂, Z₁-Z₂-Z₃-X₁-X₂-X₃-Y₁-Y₂, Z₁-Z₂-Z₃-X₁-X₂-X₃-X₄-Y₁-Y₂, Z₁-Z₂-Z₃-X₁-X₂-Y₁-Y₂-Y₃, Z₁-Z₂-Z₃-X₁-X₂-X₃-Y₁-Y₂-Y₃, Z₁-Z₂-Z₃-X₁-X₂-X₃-X₄-Y₁-Y₂-Y₃, Z₁-Z₂-Z₃-X₁-X₂-Y₁-Y₂-Y₃-Y₄, Z₁-Z₂-Z₃-X₁-X₂-X₃-Y₁-Y₂-Y₃-Y₄, Z₁-Z₂-Z₃-X₁-X₂-X₃-X₄-Y₁-Y₂-Y₃-Y₄, Z₁-Z₂-Z₃-Z₄-X₁-X₂-Y₁-Y₂, Z₁-Z₂-Z₃-Z₄-X₁-X₂-X₃-Y₁-Y₂, Z₁-Z₂-Z₃-Z₄-X₁-X₂-X₃-X₄-Y₁-Y₂, Z₁-Z₂-Z₃-Z₄-X₁-X₂-Y₁-Y₂-Y₃, Z₁-Z₂-Z₃-Z₄-X₁-X₂-X₃-Y₁-Y₂-Y₃, Z₁-Z₂-Z₃-Z₄-X₁-X₂-X₃-X₄-Y₁-Y₂-Y₃, Z₁-Z₂-Z₃-Z₄-X₁-X₂-Y₁-Y₂-Y₃-Y₄, Z₁-Z₂-Z₃-Z₄-X₁-X₂-X₃-Y₁-Y₂-Y₃-Y₄, Z₁-Z₂-Z₃-Z₄-X₁-X₂-X₃-X₄-Y₁-Y₂-Y₃-Y₄, Z₁-Y₁-Y₂-X₁-X₂, Z₁-Y₁-Y₂-X₁-X₂-X₃, Z₁-Y₁-Y₂-X₁-X₂-X₃-X₄, Z₁-Y₁-Y₂-Y₃-X₁-X₂, Z₁-Y₁-Y₂-Y₃-X₁-X₂-X₃, Z₁-Y₁-Y₂-Y₃-X₁-X₂-X₃-X₄, Z₁-Y₁-Y₂-Y₃-Y₄-X₁-X₂, Z₁-Y₁-Y₂-Y₃-Y₄-X₁-X₂-X₃, Z₁-Y₁-Y₂-Y₃-Y₄-X₁-X₂-X₃-X₄, Z₁-Z₂-Y₁-Y₂-X₁-X₂, Z₁-Z₂-Y₁-Y₂-X₁-X₂-X₃, Z₁-Z₂-Y₁-Y₂-X₁-X₂-X₃-X₄, Z₁-Z₂-Y₁-Y₂-Y₃-X₁-X₂, Z₁-Z₂-Y₁-Y₂-Y₃-X₁-X₂-X₃, Z₁-Z₂-Y₁-Y₂-Y₃-X₁-X₂-X₃-X₄, Z₁-Z₂-Y₁-Y₂-Y₃-Y₄-X₁-X₂, Z₁-Z₂-Y₁-Y₂-Y₃-Y₄-X₁-X₂-X₃, Z₁-Z₂-Y₁-Y₂-Y₃-Y₄-X₁-X₂-X₃-X₄, Z₁-Z₂-Z₃-Y₁-Y₂-X₁-X₂, Z₁-Z₂-Z₃-Y₁-Y₂-X₁-X₂-X₃, Z₁-Z₂-Z₃-Y₁-Y₂-X₁-X₂-X₃-X₄, Z₁-Z₂-Z₃-Y₁-Y₂-Y₃-X₁-X₂, Z₁-Z₂-Z₃-Y₁-Y₂-Y₃-X₁-X₂-X₃, Z₁-Z₂-Z₃-Y₁-Y₂-Y₃-X₁-X₂-X₃-X₄, Z₁-Z₂-Z₃-Y₁-Y₂-Y₃-Y₄-X₁-X₂, Z₁-Z₂-Z₃-Y₁-Y₂-Y₃-Y₄-X₁-X₂-X₃, Z₁-Z₂-Z₃-Y₁-Y₂-Y₃-Y₄-X₁-X₂-X₃-X₄, Z₁-Z₂-Z₃-Z₄-Y₁-Y₂-X₁-X₂, Z₁-Z₂-Z₃-Z₄-Y₁-Y₂-X₁-X₂-X₃, Z₁-Z₂-Z₃-Z₄-Y₁-Y₂-X₁-X₂-X₃-X₄, Z₁-Z₂-Z₃-Z₄-Y₁-Y₂-Y₃-X₁-X₂, Z₁-Z₂-Z₃-Z₄-Y₁-Y₂-Y₃-X₁-X₂-X₃, Z₁-Z₂-Z₃-Z₄-Y₁-Y₂-Y₃-X₁-X₂-X₃-X₄, Z₁-Z₂-Z₃-Z₄-Y₁-Y₂-Y₃-Y₄-X₁-X₂, Z₁-Z₂-Z₃-Z₄-Y₁-Y₂-Y₃-Y₄-X₁-X₂-X₃, Z₁-Z₂-Z₃-Z₄-Y₁-Y₂-Y₃-Y₄-X₁-X₂-X₃-X₄, X₁-X₂-Y₁-Y₂-Z₁, X₁-X₂-X₃-Y₁-Y₂-Z₁, X₁-X₂-X₃-X₄-Y₁-Y₂-Z₁, X₁-X₂-Y₁-Y₂-Y₃-Z₁, X₁-X₂-X₃-Y₁-Y₂-Y₃-Z₁, X₁-X₂-X₃-X₄-Y₁-Y₂-Y₃-Z₁, X₁-X₂-Y₁-Y₂-Y₃-Y₄-Z₁, X₁-X₂-X₃-Y₁-Y₂-Y₃-Y₄-Z₁, X₁-X₂-X₃-X₄-Y₁-Y₂-Y₃-Y₄-Z₁, X₁-X₂-Y₁-Y₂-Z₁-Z₂, X₁-X₂-X₃-Y₁-Y₂-Z₁-Z₂, X₁-X₂-X₃-X₄-Y₁-Y₂-Z₁-Z₂, X₁-X₂-Y₁-Y₂-Y₃-Z₁-Z₂, X₁-X₂-X₃-Y₁-Y₂-Y₃-Z₁-Z₂, X₁-X₂-X₃-X₄-Y₁-Y₂-Y₃-Z₁-Z₂, X₁-X₂-Y₁-Y₂-Y₃-Y₄-Z₁-Z₂, X₁-X₂-X₃-Y₁-Y₂-Y₃-Y₄-Z₁-Z₂, X₁-X₂-X₃-X₄-Y₁-Y₂-Y₃-Y₄-Z₁-Z₂, X₁-X₂-Y₁-Y₂-Z₁-Z₂-Z₃, X₁-X₂-X₃-Y₁-Y₂-Z₁-Z₂-Z₃, X₁-X₂-X₃-X₄-Y₁-Y₂-Z₁-Z₂-Z₃, X₁-X₂-Y₁-Y₂-Y₃-Z₁-Z₂-Z₃, X₁-X₂-X₃-Y₁-Y₂-Y₃-Z₁-Z₂-Z₃, X₁-X₂-X₃-X₄-Y₁-Y₂-Y₃-Z₁-Z₂-Z₃, X₁-X₂-Y₁-Y₂-Y₃-Y₄-Z₁-Z₂-Z₃, X₁-X₂-X₃-Y₁-Y₂-Y₃-Y₄-Z₁-Z₂-Z₃, X₁-X₂-X₃-X₄-Y₁-Y₂-Y₃-Y₄-Z₁-Z₂-Z₃, X₁-X₂-Y₁-Y₂-Z₁-Z₂-Z₃-Z₄, X₁-X₂-X₃-Y₁-Y₂-Z₁-Z₂-Z₃-Z₄, X₁-X₂-X₃-X₄-Y₁-Y₂-Z₁-Z₂-Z₃-Z₄, X₁-X₂-Y₁-Y₂-Y₃-Z₁-Z₂-Z₃-Z₄, X₁-X₂-X₃-Y₁-Y₂-Y₃-Z₁-Z₂-Z₃-Z₄, X₁-X₂-X₃-X₄-Y₁-Y₂-Y₃-Z₁-Z₂-Z₃-Z₄, X₁-X₂-Y₁-Y₂-Y₃-Y₄-Z₁-Z₂-Z₃-Z₄, X₁-X₂-X₃-Y₁-Y₂-Y₃-Y₄-Z₁-Z₂-Z₃-Z₄, X₁-X₂-X₃-X₄-Y₁-Y₂-Y₃-Y₄-Z₁-Z₂-Z₃-Z₄, Y₁-Y₂-X₁-X₂-Z₁, Y₁-Y₂-X₁-X₂-X₃-Z₁, Y₁-Y₂-X₁-X₂-X₃-X₄-Z₁, Y₁-Y₂-Y₃-X₁-X₂-Z₁, Y₁-Y₂-Y₃-X₁-X₂-X₃-Z₁, Y₁-Y₂-Y₃-X₁-X₂-X₃-X₄-Z₁, Y₁-Y₂-Y₃-Y₄-X₁-X₂-Z₁, Y₁-Y₂-Y₃-Y₄-X₁-X₂-X₃-Z₁, Y₁-Y₂-Y₃-Y₄-X₁-X₂-X₃-X₄-Z₁, Y₁-Y₂-X₁-X₂-Z₁-Z₂, Y₁-Y₂-X₁-X₂-X₃-Z₁-Z₂, Y₁-Y₂-X₁-X₂-X₃-X₄-Z₁-Z₂, Y₁-Y₂-Y₃-X₁-X₂-Z₁-Z₂, Y₁-Y₂-Y₃-X₁-X₂-X₃-Z₁-Z₂, Y₁-Y₂-Y₃-X₁-X₂-X₃-X₄-Z₁-Z₂, Y₁-Y₂-Y₃-Y₄-X₁-X₂-Z₁-Z₂, Y₁-Y₂-Y₃-Y₄-X₁-X₂-X₃-Z₁-Z₂, Y₁-Y₂-Y₃-Y₄-X₁-X₂-X₃-X₄-Z₁-Z₂, Y₁-Y₂-X₁-X₂-Z₁-Z₂-Z₃, Y₁-Y₂-X₁-X₂-X₃-Z₁-Z₂-Z₃, Y₁-Y₂-X₁-X₂-X₃-X₄-Z₁-Z₂-Z₃, Y₁-Y₂-Y₃-X₁-X₂-Z₁-Z₂-Z₃, Y₁-Y₂-Y₃-X₁-X₂-X₃-Z₁-Z₂-Z₃, Y₁-Y₂-Y₃-X₁-X₂-X₃-X₄-Z₁-Z₂-Z₃, Y₁-Y₂-Y₃-Y₄-X₁-X₂-Z₁-Z₂-Z₃, Y₁-Y₂-Y₃-Y₄-X₁-X₂-X₃-Z₁-Z₂-Z₃, Y₁-Y₂-Y₃-Y₄-X₁-X₂-X₃-X₄-Z₁-Z₂-Z₃, Y₁-Y₂-X₁-X₂-Z₁-Z₂-Z₃-Z₄, Y₁-Y₂-X₁-X₂-X₃-Z₁-Z₂-Z₃-Z₄, Y₁-Y₂-X₁-X₂-X₃-X₄-Z₁-Z₂-Z₃-Z₄, Y₁-Y₂-Y₃-X₁-X₂-Z₁-Z₂-Z₃-Z₄, Y₁-Y₂-Y₃-X₁-X₂-X₃-Z₁-Z₂-Z₃-Z₄, Y₁-Y₂-Y₃-X₁-X₂-X₃-X₄-Z₁-Z₂-Z₃-Z₄, Y₁-Y₂-Y₃-Y₄-X₁-X₂-Z₁-Z₂-Z₃-Z₄, Y₁-Y₂-Y₃-Y₄-X₁-X₂-X₃-Z₁-Z₂-Z₃-Z₄, Y₁-Y₂-Y₃-Y₄-X₁-X₂-X₃-X₄-Z₁-Z₂-Z₃-Z₄, Z₁-X₁-X₂-Y₁-Y₂, Z₁-X₁-X₂-X₃-Y₁-Y₂, Z₁-X₁-X₂-X₃-X₄-Y₁-Y₂, Z₁-X₁-X₂-Y₁-Y₂-Y₃, Z₁-X₁-X₂-X₃-Y₁-Y₂-Y₃, Z₁-X₁-X₂-X₃-X₄-Y₁-Y₂-Y₃, Z₁-X₁-X₂-Y₁-Y₂-Y₃-Y₄, Z₁-X₁-X₂-X₃-Y₁-Y₂-Y₃-Y₄, Z₁-X₁-X₂-X₃-X₄-Y₁-Y₂-Y₃-Y₄, Z₁-Z₂-X₁-X₂-Y₁-Y₂, Z₁-Z₂-X₁-X₂-X₃-Y₁-Y₂, Z₁-Z₂-X₁-X₂-X₃-X₄-Y₁-Y₂, Z₁-Z₂-X₁-X₂-Y₁-Y₂-Y₃, Z₁-Z₂-X₁-X₂-X₃-Y₁-Y₂-Y₃, Z₁-Z₂-X₁-X₂-X₃-X₄-Y₁-Y₂-Y₃, Z₁-Z₂-X₁-X₂-Y₁-Y₂-Y₃-Y₄, Z₁-Z₂-X₁-X₂-X₃-Y₁-Y₂-Y₃-Y₄, Z₁-Z₂-X₁-X₂-X₃-X₄-Y₁-Y₂-Y₃-Y₄, Z₁-Z₂-Z₃-X₁-X₂-Y₁-Y₂, Z₁-Z₂-Z₃-X₁-X₂-X₃-Y₁-Y₂, Z₁-Z₂-Z₃-X₁-X₂-X₃-X₄-Y₁-Y₂, Z₁-Z₂-Z₃-X₁-X₂-Y₁-Y₂-Y₃, Z₁-Z₂-Z₃-X₁-X₂-X₃-Y₁-Y₂-Y₃, Z₁-Z₂-Z₃-X₁-X₂-X₃-X₄-Y₁-Y₂-Y₃, Z₁-Z₂-Z₃-X₁-X₂-Y₁-Y₂-Y₃-Y₄, Z₁-Z₂-Z₃-X₁-X₂-X₃-Y₁-Y₂-Y₃-Y₄, Z₁-Z₂-Z₃-X₁-X₂-X₃-X₄-Y₁-Y₂-Y₃-Y₄, Z₁-Z₂-Z₃-Z₄-X₁-X₂-Y₁-Y₂, Z₁-Z₂-Z₃-Z₄-X₁-X₂-X₃-Y₁-Y₂, Z₁-Z₂-Z₃-Z₄-X₁-X₂-X₃-X₄-Y₁-Y₂, Z₁-Z₂-Z₃-Z₄-X₁-X₂-Y₁-Y₂-Y₃, Z₁-Z₂-Z₃-Z₄-X₁-X₂-X₃-Y₁-Y₂-Y₃, Z₁-Z₂-Z₃-Z₄-X₁-X₂-X₃-X₄-Y₁-Y₂-Y₃, Z₁-Z₂-Z₃-Z₄-X₁-X₂-Y₁-Y₂-Y₃-Y₄, Z₁-Z₂-Z₃-Z₄-X₁-X₂-X₃-Y₁-Y₂-Y₃-Y₄, Z₁-Z₂-Z₃-Z₄-X₁-X₂-X₃-X₄-Y₁-Y₂-Y₃-Y₄, X₁-X₂-Y₁-Y₂-Z₁, X₁-X₂-X₃-Y₁-Y₂-Z₁, X₁-X₂-X₃-X₄-Y₁-Y₂-Z₁, X₁-X₂-Y₁-Y₂-Y₃-Z₁, X₁-X₂-X₃-Y₁-Y₂-Y₃-Z₁, X₁-X₂-X₃-X₄—Y₁-Y₂-Y₃-Z₁, X₁-X₂-Y₁-Y₂-Y₃-Y₄-Z₁, X₁-X₂-X₃-Y₁-Y₂-Y₃-Y₄-Z₁, X₁-X₂-X₃-X₄-Y₁-Y₂-Y₃-Y₄-Z₁, Z₁-X₁-X₂-Y₁-Y₂-Z₁, Z₁-X₁-X₂-X₃-Y₁-Y₂-Z₁, Z₁-X₁-X₂-X₃-X₄-Y₁-Y₂-Z₁, Z₁-X₁-X₂-Y₁-Y₂-Y₃-Z₁, Z₁-X₁-X₂-X₃-Y₁-Y₂-Y₃-Z₁, Z₁-X₁-X₂-X₃-X₄-Y₁-Y₂-Y₃-Z₁, Z₁-X₁-X₂-Y₁-Y₂-Y₃-Y₄-Z₁, Z₁-X₁-X₂-X₃-Y₁-Y₂-Y₃-Y₄-Z₁, Z₁-X₁-X₂-X₃-X₄-Y₁-Y₂-Y₃-Y₄-Z₁, Z₁-Z₂-X₁-X₂-Y₁-Y₂-Z₁, Z₁-Z₂-X₁-X₂-X₃-Y₁-Y₂-Z₁, Z₁-Z₂-X₁-X₂-X₃-X₄-Y₁-Y₂-Z₁, Z₁-Z₂-X₁-X₂-Y₁-Y₂-Y₃-Z₁, Z₁-Z₂-X₁-X₂-X₃-Y₁-Y₂-Y₃-Z₁, Z₁-Z₂-X₁-X₂-X₃-X₄-Y₁-Y₂-Y₃-Z₁, Z₁-Z₂-X₁-X₂-Y₁-Y₂-Y₃-Y₄-Z₁, Z₁-Z₂-X₁-X₂-X₃-Y₁-Y₂-Y₃-Y₄-Z₁, Z₁-Z₂-X₁-X₂-X₃-X₄-Y₁-Y₂-Y₃-Y₄-Z₁, Z₁-Z₂-Z₃-X₁-X₂-Y₁-Y₂-Z₁, Z₁-Z₂-Z₃-X₂-X₃-Y₁-Y₂-Z₁, Z₁-Z₂-Z₃-X₁-X₂-X₃-X₄-Y₁-Y₂-Z₁, Z₁-Z₂-Z₃-X₁-X₂-Y₁-Y₂-Y₃-Z₁, Z₁-Z₂-Z₃-X₁-X₂-X₃-Y₁-Y₂-Y₃-Z₁, Z₁-Z₂-Z₃-X₁-X₂-X₃-X₄-Y₁-Y₂-Y₃-Z₁, Z₁-Z₂-Z₃-X₁-X₂-Y₁-Y₂-Y₃-Y₄-Z₁, Z₁-Z₂-Z₃-X₁-X₂-X₃-Y₁-Y₂-Y₃-Y₄-Z₁, Z₁-Z₂-Z₃-X₁-X₂-X₃-X₄-Y₁-Y₂-Y₃-Y₄-Z₁, Z₁-Z₂-Z₃-Z₄-X₁-X₂-Y₁-Y₂-Z₁, Z₁-Z₂-Z₃-Z₄-X₁-X₂-X₃-Y₁-Y₂-Z₁, Z₁-Z₂-Z₃-Z₄-X₁-X₂-X₃-X₄-Y₁-Y₂-Z₁, Z₁-Z₂-Z₃-Z₄-X₁-X₂-Y₁-Y₂-Y₃-Z₁, Z₁-Z₂-Z₃-Z₄-X₁-X₂-X₃-Y₁-Y₂-Y₃-Z₁, Z₁-Z₂-Z₃-Z₄-X₁-X₂-X₃-X₄-Y₁-Y₂-Y₃-Z₁, Z₁-Z₂-Z₃-Z₄-X₁-X₂-Y₁-Y₂-Y₃-Y₄-Z₁, Z₁-Z₂-Z₃-Z₄-X₁-X₂-X₃-Y₁-Y₂-Y₃-Y₄-Z₁, Z₁-Z₂-Z₃-Z₄-X₁-X₂-X₃-X₄-Y₁-Y₂-Y₃-Y₄-Z₁, X₁-X₂-Y₁-Y₂-Z₁-Z₂, X₁-X₂-X₃-Y₁-Y₂-Z₁-Z₂, X₁-X₂-X₃-X₄-Y₁-Y₂-Z₁-Z₂, X₁-X₂-Y₁-Y₂-Y₃-Z₁-Z₂, X₁-X₂-X₃-Y₁-Y₂-Y₃-Z₁-Z₂, X₁-X₂-X₃-X₄-Y₁-Y₂-Y₃-Z₁-Z₂, X₁-X₂-Y₁-Y₂-Y₃-Y₄-Z₁-Z₂, X₁-X₂-X₃-Y₁-Y₂-Y₃-Y₄-Z₁-Z₂, X₁-X₂-X₃-X₄-Y₁-Y₂-Y₃-Y₄-Z₁-Z₂, Z₁-X₁-X₂-Y₁-Y₂-Z₁-Z₂, Z₁-X₁-X₂-X₃-Y₁-Y₂-Z₁-Z₂, Z₁-X₁-X₂-X₃-X₄-Y₁-Y₂-Z₁-Z₂, Z₁-X₁-X₂-Y₁-Y₂-Y₃-Z₁-Z₂, Z₁-X₁-X₂-X₃-Y₁-Y₂-Y₃-Z₁-Z₂, Z₁-X₁-X₂-X₃-X₄-Y₁-Y₂-Y₃-Z₁-Z₂, Z₁-X₁-X₂-Y₁-Y₂-Y₃-Y₄-Z₁-Z₂, Z₁-X₁-X₂-X₃-Y₁-Y₂-Y₃-Y₄-Z₁-Z₂, Z₁-X₁-X₂-X₃-X₄-Y₁-Y₂-Y₃-Y₄-Z₁-Z₂, Z₁-Z₂-X₁-X₂-Y₁-Y₂-Z₁-Z₂, Z₁-Z₂-X₁-X₂-X₃-Y₁-Y₂-Z₁-Z₂, Z₁-Z₂-X₁-X₂-X₃-X₄-Y₁-Y₂-Z₁-Z₂, Z₁-Z₂-X₁-X₂-Y₁-Y₂-Y₃-Z₁-Z₂, Z₁-Z₂-X₁-X₂-X₃-Y₁-Y₂-Y₃-Z₁-Z₂, Z₁-Z₂-X₁-X₂-X₃-X₄-Y₁-Y₂-Y₃-Z₁-Z₂, Z₁-Z₂-X₁-X₂-Y₁-Y₂-Y₃-Y₄-Z₁-Z₂, Z₁-Z₂-X₁-X₂-X₃-Y₁-Y₂-Y₃-Y₄-Z₁-Z₂, Z₁-Z₂-X₁-X₂-X₃-X₄-Y₁-Y₂-Y₃-Y₄-Z₁-Z₂, Z₁-Z₂-Z₃-X₁-X₂-Y₁-Y₂-Z₁-Z₂, Z₁-Z₂-Z₃-X₁-X₂-X₃-Y₁-Y₂-Z₁-Z₂, Z₁-Z₂-Z₃-X₁-X₂-X₃-X₄-Y₁-Y₂-Z₁-Z₂, Z₁-Z₂-Z₃-X₁-X₂-Y₁-Y₂-Y₃-Z₁-Z₂, Z₁-Z₂-Z₃-X₁-X₂-X₃-Y₁-Y₂-Y₃-Z₁-Z₂, Z₁-Z₂-Z₃-X₁-X₂-X₃-X₄-Y₁-Y₂-Y₃-Z₁-Z₂, Z₁-Z₂-Z₃-X₁-X₂-Y₁-Y₂-Y₃-Y₄-Z₁-Z₂, Z₁-Z₂-Z₃-X₁-X₂-X₃-Y₁-Y₂-Y₃-Y₄-Z₁-Z₂, Z₁-Z₂-Z₃-X₁-X₂-X₃-X₄-Y₁-Y₂-Y₃-Y₄-Z₁-Z₂, Z₁-Z₂-Z₃-Z₄-X₁-X₂-Y₁-Y₂-Z₁-Z₂, Z₁-Z₂-Z₃-Z₄-X₁-X₂-X₃-Y₁-Y₂-Z₁-Z₂, Z₁-Z₂-Z₃-Z₄-X₁-X₂-X₃-X₄-Y₁-Y₂-Z₁-Z₂, Z₁-Z₂-Z₃-Z₄-X₁-X₂-Y₁-Y₂-Y₃-Z₁-Z₂, Z₁-Z₂-Z₃-Z₄-X₁-X₂-X₃-Y₁-Y₂-Y₃-Z₁-Z₂, Z₁-Z₂-Z₃-Z₄-X₁-X₂-X₃-X₄-Y₁-Y₂-Y₃-Z₁-Z₂, Z₁-Z₂-Z₃-Z₄-X₁-X₂-Y₁-Y₂-Y₃-Y₄-Z₁-Z₂, Z₁-Z₂-Z₃-Z₄-X₁-X₂-X₃-Y₁-Y₂-Y₃-Y₄-Z₁-Z₂, Z₁-Z₂-Z₃-Z₄-X₁-X₂-X₃-X₄-Y₁-Y₂-Y₃-Y₄-Z₁-Z₂, X₁-X₂-Y₁-Y₂-Z₁-Z₂-Z₃, X₁-X₂-X₃-Y₁-Y₂-Z₁-Z₂-Z₃, X₁-X₂-X₃-X₄-Y₁-Y₂-Z₁-Z₂-Z₃, X₁-X₂-Y₁-Y₂-Y₃-Z₁-Z₂-Z₃, X₁-X₂-X₃-Y₁-Y₂-Y₃-Z₁-Z₂-Z₃, X₁-X₂-X₃-X₄-Y₁-Y₂-Y₃-Z₁-Z₂-Z₃, X₁-X₂-Y₁-Y₂-Y₃-Y₄-Z₁-Z₂-Z₃, X₁-X₂-X₃-Y₁-Y₂-Y₃-Y₄-Z₁-Z₂-Z₃, X₁-X₂-X₃-X₄-Y₁-Y₂-Y₃-Y₄-Z₁-Z₂-Z₃, Z₁-X₁-X₂-Y₁-Y₂-Z₁-Z₂-Z₃, Z₁-X₁-X₂-X₃-Y₁-Y₂-Z₁-Z₂-Z₃, Z₁-X₁-X₂-X₃-X₄-Y₁-Y₂-Z₁-Z₂-Z₃, Z₁-X₁-X₂-Y₁-Y₂-Y₃-Z₁-Z₂-Z₃, Z₁-X₁-X₂-X₃-Y₁-Y₂-Y₃-Z₁-Z₂-Z₃, Z₁-X₁-X₂-X₃-X₄-Y₁-Y₂-Y₃-Z₁-Z₂-Z₃, Z₁-X₁-X₂-Y₁-Y₂-Y₃-Y₄-Z₁-Z₂-Z₃, Z₁-X₁-X₂-X₃-Y₁-Y₂-Y₃-Y₄-Z₁-Z₂-Z₃, Z₁-X₁-X₂-X₃-X₄-Y₁-Y₂-Y₃-Y₄-Z₁-Z₂-Z₃, Z₁-Z₂-X₁-X₂-Y₁-Y₂-Z₁-Z₂-Z₃, Z₁-Z₂-X₁-X₂-X₃-Y₁-Y₂-Z₁-Z₂-Z₃, Z₁-Z₂-X₁-X₂-X₃-X₄-Y₁-Y₂-Z₁-Z₂-Z₃, Z₁-Z₂-X₁-X₂-Y₁-Y₂-Y₃-Z₁-Z₂-Z₃, Z₁-Z₂-X₁-X₂-X₃-Y₁-Y₂-Y₃-Z₁-Z₂-Z₃, Z₁-Z₂-X₁-X₂-X₃-X₄-Y₁-Y₂-Y₃-Z₁-Z₂-Z₃, Z₁-Z₂-X₁-X₂-Y₁-Y₂-Y₃-Y₄-Z₁-Z₂-Z₃, Z₁-Z₂-X₁-X₂-X₃-Y₁-Y₂-Y₃-Y₄-Z₁-Z₂-Z₃, Z₁-Z₂-X₁-X₂-X₃-X₄-Y₁-Y₂-Y₃-Y₄-Z₁-Z₂-Z₃, Z₁-Z₂-Z₃-X₁-X₂-Y₁-Y₂-Z₁-Z₂-Z₃, Z₁-Z₂-Z₃-X₁-X₂-X₃-Y₁-Y₂-Z₁-Z₂-Z₃, Z₁-Z₂-Z₃-X₁-X₂-X₃-X₄-Y₁-Y₂-Z₁-Z₂-Z₃, Z₁-Z₂-Z₃-X₁-X₂-Y₁-Y₂-Y₃-Z₁-Z₂-Z₃, Z₁-Z₂-Z₃-X₁-X₂-X₃-Y₁-Y₂-Y₃-Z₁-Z₂-Z₃, Z₁-Z₂-Z₃-X₁-X₂-X₃-X₄-Y₁-Y₂-Y₃-Z₁-Z₂-Z₃, Z₁-Z₂-Z₃-X₁-X₂-Y₁-Y₂-Y₃-Y₄-Z₁-Z₂-Z₃, Z₁-Z₂-Z₃-X₁-X₂-X₃-Y₁-Y₂-Y₃-Y₄-Z₁-Z₂-Z₃, Z₁-Z₂-Z₃-X₁-X₂-X₃-X₄-Y₁-Y₂-Y₃-Y₄-Z₁-Z₂-Z₃, Z₁-Z₂-Z₃-Z₄-X₁-X₂-Y₁-Y₂-Z₁-Z₂-Z₃, Z₁-Z₂-Z₃-Z₄-X₁-X₂-X₃-Y₁-Y₂-Z₁-Z₂-Z₃, Z₁-Z₂-Z₃-Z₄-X₁-X₂-X₃-X₄-Y₁-Y₂-Z₁-Z₂-Z₃, Z₁-Z₂-Z₃-Z₄-X₁-X₂-Y₁-Y₂-Y₃-Z₁-Z₂-Z₃, Z₁-Z₂-Z₃-Z₄-X₁-X₂-X₃-Y₁-Y₂-Y₃-Z₁-Z₂-Z₃, Z₁-Z₂-Z₃-Z₄-X₁-X₂-X₃-X₄-Y₃-Z₁-Z₂-Z₃, Z₁-Z₂-Z₃-Z₄-X₁-X₂-Y₁-Y₂-Y₃-Y₄-Z₁-Z₂-Z₃, Z₁-Z₂-Z₃-Z₄-X₁-X₂-X₃-Y₁-Y₂-Y₃-Y₄-Z₁-Z₂-Z₃, Z₁-Z₂-Z₃-Z₄-X₁-X₂-X₃-X₄-Y₁-Y₂-Y₃-Y₄-Z₁-Z₂-Z₃, X₁-X₂-Y₁-Y₂-Z₁-Z₂-Z₃-Z₄, X₁-X₂-X₃-Y₁-Y₂-Z₁-Z₂-Z₃-Z₄, X₁-X₂-X₃-X₄-Y₁-Y₂-Z₁-Z₂-Z₃-Z₄, X₁-X₂-Y₁-Y₂-Y₃-Z₁-Z₂-Z₃-Z₄, X₁-X₂-X₃-Y₁-Y₂-Y₃-Z₁-Z₂-Z₃-Z₄, X₁-X₂-X₃-X₄-Y₁-Y₂-Y₃-Z₁-Z₂-Z₃-Z₄, X₁-X₂-Y₁-Y₂-Y₃-Y₄-Z₁-Z₂-Z₃-Z₄, X₁-X₂-X₃-Y₁-Y₂-Y₃-Y₄-Z₁-Z₂-Z₃-Z₄, X₁-X₂-X₃-X₄-Y₁-Y₂-Y₃-Y₄-Z₁-Z₂-Z₃-Z₄, Z₁-X₁-X₂-Y₁-Y₂-Z₁-Z₂-Z₃-Z₄, Z₁-X₁-X₂-X₃-Y₁-Y₂-Z₁-Z₂-Z₃-Z₄, Z₁-X₁-X₂-X₃-X₄-Y₁-Y₂-Z₁-Z₂-Z₃-Z₄, Z₁-X₁-X₂-Y₁-Y₂-Y₃-Z₁-Z₂-Z₃-Z₄, Z₁-X₁-X₂-X₃-Y₁-Y₂-Y₃-Z₁-Z₂-Z₃-Z₄, Z₁-X₁-X₂-X₃-X₄-Y₁-Y₂-Y₃-Z₁-Z₂-Z₃-Z₄, Z₁-X₁-X₂-Y₁-Y₂-Y₃-Y₄-Z₁-Z₂-Z₃-Z₄, Z₁-X₁-X₂-X₃-Y₁-Y₂-Y₃-Y₄-Z₁-Z₂-Z₃-Z₄, Z₁-X₁-X₂-X₃-X₄-Y₁-Y₂-Y₃-Y₄-Z₁-Z₂-Z₃-Z₄, Z₁-Z₂-X₁-X₂-Y₁-Y₂-Z₁-Z₂-Z₃-Z₄, Z₁-Z₂-X₁-X₂-X₃-Y₁-Y₂-Z₁-Z₂-Z₃-Z₄, Z₁-Z₂-X₁-X₂-X₃-X₄-Y₁-Y₂-Z₁-Z₂-Z₃-Z₄, Z₁-Z₂-X₁-X₂-Y₁-Y₂-Y₃-Z₁-Z₂-Z₃-Z₄, Z₁-Z₂-X₁-X₂-X₃-Y₁-Y₂-Y₃-Z₁-Z₂-Z₃-Z₄, Z₁-Z₂-X₁-X₂-X₃-X₄-Y₁-Y₂-Y₃-Z₁-Z₂-Z₃-Z₄, Z₁-Z₂-X₁-X₂-Y₁-Y₂-Y₃-Y₄-Z₁-Z₂-Z₃-Z₄, Z₁-Z₂-X₁-X₂-X₃-Y₁-Y₂-Y₃-Y₄-Z₁-Z₂-Z₃-Z₄, Z₁-Z₂-X₁-X₂-X₃-X₄-Y₁-Y₂-Y₃-Y₄-Z₁-Z₂-Z₃-Z₄, Z₁-Z₂-Z₃-X₁-X₂-Y₁-Y₂-Z₁-Z₂-Z₃-Z₄, Z₁-Z₂-Z₃-X₁-X₂-X₃-Y₁-Y₂-Z₁-Z₂-Z₃-Z₄, Z₁-Z₂-Z₃-X₁-X₂-X₃-X₄-Y₁-Y₂-Z₁-Z₂-Z₃-Z₄, Z₁-Z₂-Z₃-X₁-X₂-Y₁-Y₂-Y₃-Z₁-Z₂-Z₃-Z₄, Z₁-Z₂-Z₃-X₁-X₂-X₃-Y₁-Y₂-Y₃-Z₁-Z₂-Z₃-Z₄, Z₁-Z₂-Z₃-X₁-X₂-X₃-X₄-Y₁-Y₂-Y₃-Z₁-Z₂-Z₃-Z₄, Z₁-Z₂-Z₃-X₁-X₂-Y₁-Y₂-Y₃-Y₄-Z₁-Z₂-Z₃-Z₄, Z₁-Z₂-Z₃-X₁-X₂-X₃-Y₁-Y₂-Y₃-Y₄-Z₁-Z₂-Z₃-Z₄, Z₁-Z₂-Z₃-X₁-X₂-X₃-X₄-Y₁-Y₂-Y₃-Y₄-Z₁-Z₂-Z₃-Z₄, Z₁-Z₂-Z₃-Z₄-X₁-X₂-Y₁-Y₂-Z₁-Z₂-Z₃-Z₄, Z₁-Z₂-Z₃-Z₄-X₁-X₂-X₃-Y₁-Y₂-Z₁-Z₂-Z₃-Z₄, Z₁-Z₂-Z₃-Z₄-X₁-X₂-X₃-X₄-Y₁-Y₂-Z₁-Z₂-Z₃-Z₄, Z₁-Z₂-Z₃-Z₄-X₁-X₂-Y₁-Y₂-Y₃-Z₁-Z₂-Z₃-Z₄, Z₁-Z₂-Z₃-Z₄-X₁-X₂-X₃-Y₁-Y₂-Y₃-Z₁-Z₂-Z₃-Z₄, Z₁-Z₂-Z₃-Z₄-X₁-X₂-X₃-X₄-Y₁-Y₂-Y₃-Z₁-Z₂-Z₃-Z₄, Z₁-Z₂-Z₃-Z₄-X₁-X₂-Y₁-Y₂-Y₃-Y₄-Z₁-Z₂-Z₃-Z₄, Z₁-Z₂-Z₃-Z₄-X₁-X₂-X₃-Y₁-Y₂-Y₃-Y₄-Z₁-Z₂-Z₃-Z₄, Z₁-Z₂-Z₃-Z₄-X₁-X₂-X₃-X₄-Y₁-Y₂-Y₃-Y₄-Z₁-Z₂-Z₃-Z₄, Z₁-Y₁-Y₂-X₁-X₂, Z₁-Y₁-Y₂-X₁-X₂-X₃, Z₁-Y₁-Y₂-X₁-X₂-X₃-X₄, Z₁-Y₁-Y₂-Y₃-X₁-X₂, Z₁-Y₁-Y₂-Y₃-X₁-X₂-X₃, Z₁-Y₁-Y₂-Y₃-X₁-X₂-X₃-X₄, Z₁-Y₁-Y₂-Y₃-Y₄-X₁-X₂, Z₁-Y₁-Y₂-Y₃-Y₄-X₁-X₂-X₃, Z₁-Y₁-Y₂-Y₃-Y₄-X₁-X₂-X₃-X₄, Z₁-Z₂-Y₁-Y₂-X₁-X₂, Z₁-Z₂-Y₁-Y₂-X₁-X₂-X₃, Z₁-Z₂-Y₁-Y₂-X₁-X₂-X₃-X₄, Z₁-Z₂-Y₁-Y₂-Y₃-X₁-X₂, Z₁-Z₂-Y₁-Y₂-Y₃-X₁-X₂-X₃, Z₁-Z₂-Y₁-Y₂-Y₃-X₁-X₂-X₃-X₄, Z₁-Z₂-Y₁-Y₂-Y₃-Y₄-X₁-X₂, Z₁-Z₂-Y₁-Y₂-Y₃-Y₄-X₁-X₂-X₃, Z₁-Z₂-Y₁-Y₂-Y₃-Y₄-X₁-X₂-X₃-X₄, Z₁-Z₂-Z₃-Y₁-Y₂-X₁-X₂, Z₁-Z₂-Z₃-Y₁-Y₂-X₁-X₂-X₃, Z₁-Z₂-Z₃-Y₁-Y₂-X₁-X₂-X₃-X₄, Z₁-Z₂-Z₃-Y₁-Y₂-Y₃-X₁-X₂, Z₁-Z₂-Z₃-Y₁-Y₂-Y₃-X₁-X₂-X₃, Z₁-Z₂-Z₃-Y₁-Y₂-Y₃-X₁-X₂-X₃-X₄, Z₁-Z₂-Z₃-Y₁-Y₂-Y₃-Y₄-X₁-X₂, Z₁-Z₂-Z₃-Y₁-Y₂-Y₃-Y₄-X₁-X₂-X₃, Z₁-Z₂-Z₃-Y₁-Y₂-Y₃-Y₄-X₁-X₂-X₃-X₄, Z₁-Z₂-Z₃-Z₄-Y₁-Y₂-X₁-X₂, Z₁-Z₂-Z₃-Z₄-Y₁-Y₂-X₁-X₂-X₃, Z₁-Z₂-Z₃-Z₄-Y₁-Y₂-X₁-X₂-X₃-X₄, Z₁-Z₂-Z₃-Z₄-Y₁-Y₂-Y₃-X₁-X₂, Z₁-Z₂-Z₃-Z₄-Y₁-Y₂-Y₃-X₁-X₂-X₃, Z₁-Z₂-Z₃-Z₄-Y₁-Y₂-Y₃-X₁-X₂-X₃-X₄, Z₁-Z₂-Z₃-Z₄-Y₁-Y₂-Y₃-Y₄-X₁-X₂, Z₁-Z₂-Z₃-Z₄-Y₁-Y₂-Y₃-Y₄-X₁-X₂-X₃, Z₁-Z₂-Z₃-Z₄-Y₁-Y₂-Y₃-Y₄-X₁-X₂-X₃-X₄, Y₁-Y₂-X₁-X₂-Z, Y₁-Y₂-X₁-X₂-X₃-Z₁, Y₁-Y₂-X₁- X₂-X₃-X₄-Z₁, Y₁-Y₂-Y₃-X₁-X₂-Z₁, Y₁-Y₂-Y₃-X₁-X₂-X₃-Z₁, Y₁-Y₂-Y₃-X₁-X₂-X₃-X₄-Z₁, Y₁-Y₂-Y₃-Y₄-X₁-X₂-Z₁, Y₁-Y₂-Y₃-Y₄-X₁-X₂-X₃-Z₁, Y₁-Y₂-Y₃-Y₄-X₁-X₂-X₃-X₄-Z₁, Z₁-Y₁-Y₂-X₁-X₂-Z₁, Z₁-Y₁-Y₂-X₁-X₂-X₃-Z₁, Z₁-Y₁-Y₂-X₁-X₂-X₃-X₄-Z₁, Z₁-Y₁-Y₂-Y₃-X₁-X₂-Z₁, Z₁-Y₁-Y₂-Y₃-X₁-X₂-X₃-Z₁, Z₁-Y₁-Y₂-Y₃-X₁-X₂-X₃-X₄-Z₁, Z₁-Y₁-Y₂-Y₃-Y₄-X₁-X₂-Z₁, Z₁-Y₁-Y₂-Y₃-Y₄-X₁-X₂-X₃-Z₁, Z₁-Y₁-Y₂-Y₃-Y₄-X₁-X₂-X₃-X₄-Z₁, Z₁-Z₂-Y₁-Y₂-X₁-X₂-Z₁, Z₁-Z₂-Y₁-Y₂-X₁-X₂-X₃-Z₁, Z₁-Z₂-Y₁-Y₂-X₁-X₂-X₃-X₄-Z₁, Z₁-Z₂-Y₁-Y₂-Y₃-X₁-X₂-Z₁, Z₁-Z₂-Y₁-Y₂-Y₃-X₁-X₂-X₃-Z₁, Z₁-Z₂-Y₁-Y₂-Y₃-X₁-X₂-X₃-X₄-Z₁, Z₁-Z₂-Y₁-Y₂-Y₃-Y₄-X₁-X₂-Z₁, Z₁-Z₂-Y₁-Y₂-Y₃-Y₄-X₁-X₂-X₃-Z₁, Z₁-Z₂-Y₁-Y₂-Y₃-Y₄-X₁-X₂-X₃-X₄-Z₁, Z₁-Z₂-Z₃-Y₁-Y₂-X₁-X₂-Z₁, Z₁-Z₂-Z₃-Y₁-Y₂-X₁-X₂-X₃-Z₁, Z₁-Z₂-Z₃-Y₁-Y₂-X₁-X₂-X₃-X₄-Z₁, Z₁-Z₂-Z₃-Y₁-Y₂-Y₃-X₁-X₂-Z₁, Z₁-Z₂-Z₃-Y₁-Y₂-Y₃-X₁-X₂-X₃-Z₁, Z₁-Z₂-Z₃-Y₁-Y₂-Y₃-X₁-X₂-X₃-X₄-Z₁, Z₁-Z₂-Z₃-Y₁-Y₂-Y₃-Y₄-X₁-X₂-Z₁, Z₁-Z₂-Z₃-Y₁-Y₂-Y₃-Y₄-X₁-X₂-X₃-Z₁, Z₁-Z₂-Z₃-Y₁-Y₂-Y₃-Y₄-X₁-X₂-X₃-X₄-Z₁, Z₁-Z₂-Z₃-Z₄-Y₁-Y₂-X₁-X₂-Z₁, Z₁-Z₂-Z₃-Z₄-Y₁-Y₂-X₁-X₂-X₃-Z₁, Z₁-Z₂-Z₃-Z₄-Y₁-Y₂-X₁-X₂-X₃-X₄-Z₁, Z₁-Z₂-Z₃-Z₄-Y₁-Y₂-Y₃-X₁-X₂-Z₁, Z₁-Z₂-Z₃-Z₄-Y₁-Y₂-Y₃-X₂-X₃-Z₁, Z₁-Z₂-Z₃-Z₄-Y₁-Y₂-Y₃-X₁-X₂-X₃-X₄-Z₁, Z₁-Z₂-Z₃-Z₄-Y₁-Y₂-Y₃-Y₄-X₁-X₂-Z₁, Z₁-Z₂-Z₃-Z₄-Y₁-Y₂-Y₃-Y₄-X₁-X₂-X₃-Z₁, Z₁-Z₂-Z₃-Z₄-Y₁-Y₂-Y₃-Y₄-X₁-X₂-X₃-X₄-Z₁, Y₁-Y₂-X₁-X₂-Z₁-Z₂, Y₁-Y₂-X₁-X₂-X₃-Z₁-Z₂, Y₁-Y₂-X₁-X₂-X₃-X₄-Z₁-Z₂, Y₁-Y₂-Y₃-X₁-X₂-Z₁-Z₂, Y₁-Y₂-Y₃-X₁-X₂-X₃-Z₁-Z₂, Y₁-Y₂-Y₃-X₁-X₂-X₃-X₄-Z₁-Z₂, Y₁-Y₂-Y₃-Y₄-X₁-X₂-Z₁-Z₂, Y₁-Y₂-Y₃-Y₄-X₁-X₂-X₃-Z₁-Z₂, Y₁-Y₂-Y₃-Y₄-X₁-X₂-X₃-X₄-Z₁-Z₂, Z₁-Y₁-Y₂-X₁-X₂-Z₁-Z₂, Z₁-Y₁-Y₂-X₁-X₂-X₃-Z₁-Z₂, Z₁-Y₁-Y₂-X₁-X₂-X₃-X₄-Z₁-Z₂, Z₁-Y₁-Y₂-Y₃-X₁-X₂-Z₁-Z₂, Z₁-Y₁-Y₂-Y₃-X₁-X₂-X₃-Z₁-Z₂, Z₁-Y₁-Y₂-Y₃-X₁-X₂-X₃-X₄-Z₁-Z₂, Z₁-Y₁-Y₂-Y₃-Y₄-X₁-X₂-Z₁-Z₂, Z₁-Y₁-Y₂-Y₃-Y₄-X₁-X₂-X₃-Z₁-Z₂, Z₁-Y₁-Y₂-Y₃-Y₄-X₁-X₂-X₃-X₄-Z₁-Z₂, Z₁-Z₂-Y₁-Y₂-X₁-X₂-Z₁-Z₂, Z₁-Z₂-Y₁-Y₂-X₁-X₂-X₃-Z₁-Z₂, Z₁-Z₂-Y₁-Y₂-X₁-X₂-X₃-X₄-Z₁-Z₂, Z₁-Z₂-Y₁-Y₂-Y₃-X₁-X₂-Z₁-Z₂, Z₁-Z₂-Y₁-Y₂-Y₃-X₁-X₂-X₃-Z₁-Z₂, Z₁-Z₂-Y₁-Y₂-Y₃-X₁-X₂-X₃-X₄-Z₁-Z₂, Z₁-Z₂-Y₁-Y₂-Y₃-Y₄-X₁-X₂-Z₁-Z₂, Z₁-Z₂-Y₁-Y₂-Y₃-Y₄-X₁-X₂-X₃-Z₁-Z₂, Z₁-Z₂-Y₁-Y₂-Y₃-Y₄-X₁-X₂-X₃-X₄-Z₁-Z₂, Z₁-Z₂-Z₃-Y₁-Y₂-X₁-X₂-Z₁-Z₂, Z₁-Z₂-Z₃-Y₁-Y₂-X₁-X₂-X₃-Z₁-Z₂, Z₁-Z₂-Z₃-Y₁-Y₂-X₁-X₂-X₃-X₄-Z₁-Z₂, Z₁-Z₂-Z₃-Y₁-Y₂-Y₃-X₁-X₂-Z₁-Z₂, Z₁-Z₂-Z₃-Y₁-Y₂-Y₃-X₁-X₂-X₃-Z₁-Z₂, Z₁-Z₂-Z₃-Y₁-Y₂-Y₃-X₁-X₂-X₃-X₄-Z₁-Z₂, Z₁-Z₂-Z₃-Y₁-Y₂-Y₃-Y₄-X₁-X₂-Z₁-Z₂, Z₁-Z₂-Z₃-Y₁-Y₂-Y₃-Y₄-X₁-X₂-X₃-Z₁-Z₂, Z₁-Z₂-Z₃-Y₁-Y₂-Y₃-Y₄-X₁-X₂-X₃-X₄-Z₁-Z₂, Z₁-Z₂-Z₃-Z₄-Y₁-Y₂-X₁-X₂-Z₁-Z₂, Z₁-Z₂-Z₃-Z₄-Y₁-Y₂-X₁-X₂-X₃-Z₁-Z₂, Z₁-Z₂-Z₃-Z₄-Y₁-Y₂-X₁-X₂-X₃-X₄—Z₁-Z₂, Z₁-Z₂-Z₃-Z₄-Y₁-Y₂-Y₃-X₁-X₂-Z₁-Z₂, Z₁-Z₂-Z₃-Z₄-Y₁-Y₂-Y₃-X₁-X₂-X₃-Z₁-Z₂, Z₁-Z₂-Z₃-Z₄-Y₁-Y₂-Y₃-X₁-X₂-X₃-X₄-Z₁-Z₂, Z₁-Z₂-Z₃-Z₄-Y₁-Y₂-Y₃-Y₄-X₁-X₂-Z₁-Z₂, Z₁-Z₂-Z₃-Z₄-Y₁-Y₂-Y₃-Y₄-X₁-X₂-X₃-Z₁-Z₂, Z₁-Z₂-Z₃-Z₄-Y₁-Y₂-Y₃-Y₄-X₁-X₂-X₃-X₄-Z₁-Z₂, Y₁-Y₂-X₁-X₂-Z₁-Z₂-Z₃, Y₁-Y₂-X₁-X₂-X₃-Z₁-Z₂-Z₃, Y₁-Y₂-X₁-X₂-X₃-X₄-Z₁-Z₂-Z₃, Y₁-Y₂-Y₃-X₁-X₂-Z₁-Z₂-Z₃, Y₁-Y₂-Y₃-X₁-X₂-X₃-Z₁-Z₂-Z₃, Y₁-Y₂-Y₃-X₁-X₂-X₃-X₄-Z₁-Z₂-Z₃, Y₁-Y₂-Y₃-Y₄-X₁-X₂-Z₁-Z₂-Z₃, Y₁-Y₂-Y₃-Y₄-X₁-X₂-X₃-Z₁-Z₂-Z₃, Y₁-Y₂-Y₃-Y₄-X₁-X₂-X₃-X₄-Z₁-Z₂-Z₃, Z₁-Y₁-Y₂-X₁-X₂-Z₁-Z₂-Z₃, Z₁-Y₁-Y₂-X₁-X₂-X₃-Z₁-Z₂-Z₃, Z₁-Y₁-Y₂-X₁-X₂-X₃-X₄-Z₁-Z₂-Z₃, Z₁-Y₁-Y₂-Y₃-X₁-X₂-Z₁-Z₂-Z₃, Z₁-Y₁-Y₂-Y₃-X₁-X₂-X₃-Z₁-Z₂-Z₃, Z₁-Y₁-Y₂-Y₃-X₁-X₂-X₃-X₄-Z₁-Z₂-Z₃, Z₁-Y₁-Y₂-Y₃-Y₄-X₁-X₂-Z₁-Z₂-Z₃, Z₁-Y₁-Y₂-Y₃-Y₄-X₁-X₂-X₃-Z₁-Z₂-Z₃, Z₁-Y₁-Y₂-Y₃-Y₄-X₁-X₂-X₃-X₄-Z₁-Z₂-Z₃, Z₁-Z₂-Y₁-Y₂-X₁-X₂-Z₁-Z₂-Z₃, Z₁-Z₂-Y₁-Y₂-X₁-X₂-X₃-Z₁-Z₂-Z₃, Z₁-Z₂-Y₁-Y₂-X₁-X₂-X₃-X₄-Z₁-Z₂-Z₃, Z₁-Z₂-Y₁-Y₂-Y₃-X₁-X₂-Z₁-Z₂-Z₃, Z₁-Z₂-Y₁-Y₂-Y₃-X₁-X₂-X₃-Z₁-Z₂-Z₃, Z₁-Z₂-Y₁-Y₂-Y₃-X₁-X₂-X₃-X₄-Z₁-Z₂-Z₃, Z₁-Z₂-Y₁-Y₂-Y₃-Y₄-X₁-X₂-Z₁-Z₂-Z₃, Z₁-Z₂-Y₁-Y₂-Y₃-Y₄-X₁-X₂-X₃-Z₁-Z₂-Z₃, Z₁-Z₂-Y₁-Y₂-Y₃-Y₄-X₁-X₂-X₃-X₄-Z₁-Z₂-Z₃, Z₁-Z₂-Z₃-Y₁-Y₂-X₁-X₂-Z₁-Z₂-Z₃, Z₁-Z₂-Z₃-Y₁-Y₂-X₁-X₂-X₃-Z₁-Z₂-Z₃, Z₁-Z₂-Z₃-Y₁-Y₂-X₁-X₂-X₃-X₄-Z₁-Z₂-Z₃, Z₁-Z₂-Z₃-Y₁-Y₂-Y₃-X₁-X₂-Z₁-Z₂-Z₃, Z₁-Z₂-Z₃-Y₁-Y₂-Y₃-X₁-X₂-X₃-Z₁-Z₂-Z₃, Z₁-Z₂-Z₃-Y₁-Y₂-Y₃-X₁-X₂-X₃-X₄-Z₁-Z₂-Z₃, Z₁-Z₂-Z₃-Y₁-Y₂-Y₃-Y₄-X₁-X₂-Z₁-Z₂-Z₃, Z₁-Z₂-Z₃-Y₁-Y₂-Y₃-Y₄-X₁-X₂-X₃-Z₁-Z₂-Z₃, Z₁-Z₂-Z₃-Y₁-Y₂-Y₃-Y₄-X₁-X₂-X₃-X₄-Z₁-Z₂-Z₃, Z₁-Z₂-Z₃-Z₄-Y₁-Y₂-X₁-X₂-Z₁-Z₂-Z₃, Z₁-Z₂-Z₃-Z₄-Y₁-Y₂-X₁-X₂-X₃-Z₁-Z₂-Z₃, Z₁-Z₂-Z₃-Z₄-Y₁-Y₂-X₁-X₂-X₃-X₄-Z₁-Z₂-Z₃, Z₁-Z₂-Z₃-Z₄-Y₁-Y₂-Y₃-X₁-X₂-Z₁-Z₂-Z₃, Z₁-Z₂-Z₃-Z₄-Y₁-Y₂-Y₃-X₁-X₂-X₃-Z₁-Z₂-Z₃, Z₁-Z₂-Z₃-Z₄-Y₁-Y₂-Y₃-X₁-X₂-X₃-X₄-Z₁-Z₂-Z₃, Z₁-Z₂-Z₃-Z₄-Y₁-Y₂-Y₃-Y₄-X₁-X₂-Z₁-Z₂-Z₃, Z₁-Z₂-Z₃-Z₄-Y₁-Y₂-Y₃-Y₄-X₁-X₂-X₃-Z₁-Z₂-Z₃, Z₁-Z₂-Z₃-Z₄-Y₁-Y₂-Y₃-Y₄-X₁-X₂-X₃-X₄-Z₁-Z₂-Z₃, Y₁-Y₂-X₁-X₂-Z₁-Z₂-Z₃-Z₄, Y₁-Y₂-X₁-X₂-X₃-Z₁-Z₂-Z₃-Z₄, Y₁-Y₂-X₁-X₂-X₃-X₄-Z₁-Z₂-Z₃-Z₄, Y₁-Y₂-Y₃-X₁-X₂-Z₁-Z₂-Z₃-Z₄, Y₁-Y₂-Y₃-X₁-X₂-X₃-Z₁-Z₂-Z₃-Z₄, Y₁-Y₂-Y₃-X₁-X₂-X₃-X₄-Z₁-Z₂-Z₃-Z₄, Y₁-Y₂-Y₃-Y₄-X₁-X₂-Z₁-Z₂-Z₃-Z₄, Y₁-Y₂-Y₃-Y₄-X₁-X₂-X₃-Z₁-Z₂-Z₃-Z₄, Y₁-Y₂-Y₃-Y₄-X₁-X₂-X₃-X₄-Z₁-Z₂-Z₃-Z₄, Z₁-Y₁-Y₂-X₁-X₂-Z₁-Z₂-Z₃-Z₄, Z₁-Y₁-Y₂-X₁-X₂-X₃-Z₁-Z₂-Z₃-Z₄, Z₁-Y₁-Y₂-X₁-X₂-X₃-X₄-Z₁-Z₂-Z₃-Z₄, Z₁-Y₁-Y₂-Y₃-X₁-X₂-Z₁-Z₂-Z₃-Z₄, Z₁-Y₁-Y₂-Y₃-X₁-X₂-X₃-Z₁-Z₂-Z₃-Z₄, Z₁-Y₁-Y₂-Y₃-X₁-X₂-X₃-X₄-Z₁-Z₂-Z₃-Z₄, Z₁-Y₁-Y₂-Y₃-Y₄-X₁-X₂-Z₁-Z₂-Z₃-Z₄, Z₁-Y₁-Y₂-Y₃-Y₄-X₁-X₂-X₃-Z₁-Z₂-Z₃-Z₄, Z₁-Y₁-Y₂-Y₃-Y₄-X₁-X₂-X₃-X₄-Z₁-Z₂-Z₃-Z₄, Z₁-Z₂-Y₁-Y₂-X₁-X₂-Z₁-Z₂-Z₃-Z₄, Z₁-Z₂-Y₁-Y₂-X₁-X₂-X₃-Z₁-Z₂-Z₃-Z₄, Z₁-Z₂-Y₁-Y₂-X₁-X₂-X₃-X₄-Z₁-Z₂-Z₃-Z₄, Z₁-Z₂-Y₁-Y₂-Y₃-X₁-X₂-Z₁-Z₂-Z₃-Z₄, Z₁-Z₂-Y₁-Y₂-Y₃-X₁-X₂-X₃-Z₁-Z₂-Z₃-Z₄, Z₁-Z₂-Y₁-Y₂-Y₃-X₁-X₂-X₃-X₄-Z₁-Z₂-Z₃-Z₄, Z₁-Z₂-Y₁-Y₂-Y₃-Y₄-X₁-X₂-Z₁-Z₂-Z₃-Z₄, Z₁-Z₂-Y₁-Y₂-Y₃-Y₄-X₁-X₂-X₃-Z₁-Z₂-Z₃-Z₄, Z₁-Z₂-Y₁-Y₂-Y₃-Y₄-X₁-X₂-X₃-X₄-Z₁-Z₂-Z₃-Z₄, Z₁-Z₂-Z₃-Y₁-Y₂-X₁-X₂-Z₁-Z₂-Z₃-Z₄, Z₁-Z₂-Z₃-Y₁-Y₂-X₁-X₂-X₃-Z₁-Z₂-Z₃-Z₄, Z₁-Z₂-Z₃-Y₁-Y₂-X₁-X₂-X₃-X₄-Z₁-Z₂-Z₃-Z₄, Z₁-Z₂-Z₃-Y₁-Y₂-Y₃-X₁-X₂-Z₁-Y₂-Z₃-Z₄, Z₁-Z₂-Z₃-Y₁-Y₂-Y₃-X₁-X₂-X₃-Z₁-Z₂-Z₃-Z₄, Z₁-Z₂-Z₃-Y₁-Y₂-Y₃-X₁-X₂-X₃-X₄-Z₁-Z₂-Z₃-Z₄, Z₁-Z₂-Z₃-Y₁-Y₂-Y₃-Y₄-X₁-X₂-Z₁-Z₂-Z₃-Z₄, Z₁-Z₂-Z₃-Y₁-Y₂-Y₃-Y₄-X₁-X₂-X₃-Z₁-Z₂-Z₃-Z₄, Z₁-Z₂-Z₃-Y₁-Y₂-Y₃-Y₄-X₁-X₂-X₃-X₄-Z₁-Z₂-Z₃-Z₄, Z₁-Z₂-Z₃-Z₄-Y₁-Y₂-X₁-X₂-Z₁-Z₂-Z₃-Z₄, Z₁-Z₂-Z₃-Z₄-Y₁-Y₂-X₁-X₂-X₃-Z₁-Z₂-Z₃-Z₄, Z₁-Z₂-Z₃-Z₄-Y₁-Y₂-X₁-X₂-X₃-X₄-Z₁-Z₂-Z₃-Z₄, Z₁-Z₂-Z₃-Z₄-Y₁-Y₂-Y₃-X₁-X₂-Z₁-Z₂-Z₃-Z₄, Z₁-Z₂-Z₃-Z₄-Y₁-Y₂-Y₃-X₁-X₂-X₃-Z₁-Z₂-Z₃-Z₄, Z₁-Z₂-Z₃-Z₄-Y₁-Y₂-Y₃-X₁-X₂-X₃-X₄-Z₁-Z₂-Z₃-Z₄, Z₁-Z₂-Z₃-Z₄-Y₁-Y₂-Y₃-Y₄-X₁-X₂-Z₁-Z₂-Z₃-Z₄, Z₁-Z₂-Z₃-Z₄-Y₁-Y₂-Y₃-Y₄-X₁-X₂-X₃-Z₁-Z₂-Z₃-Z₄, Z₁-Z₂-Z₃-Z₄-Y₁-Y₂-Y₃-Y₄-X₁-X₂-X₃-X₄-Z₁-Z₂-Z₃-Z₄, wherein X₁ is selected from the group consisting of: (all single letter amino acid format) A, D, E, G, I, K, L, N, P, Q, R, and V; X₂ is selected from the group consisting of A, F, G, I, K, L, N, P, Q, R, S, T, V, and Y; X₃ is selected from the group consisting of A, D, E, F, G, I, K, L, N, Q, R, S, T, V, and Y; X₄ is selected from the group consisting of: R, H, K, D, E, S, T, N, Q, G, A, I, L, M, F, W, Y, and V. In some embodiments, Y₁ is selected from the group consisting of: (all single letter amino acid format) A, D, E, F, G, I, L, N, Q, S, T, V, and Y; Y₂ is selected from the group consisting of F, G, I, L, and Y; and Y₃ is selected from the group consisting of A, D, E, F, G, I, K, L, R, S, T, V, and Y; and Y₄ is selected from the group consisting of: R, H, K, D, E, S, T, N, Q, G, A, I, L, M, F, W, Y, and V.

[0345] In related embodiments, the method for controlling a pest infection provides expression and synthesis of an insecticidal and/or nematicidal protein in a plant or part thereof, for example, a plant tissue, a plant cell, and/or a plant seed. The insecticidal and/or nematicidal protein comprises a binary peptide as described above and can include a two amino acid spacer sequence (a Z region) fused in frame to the N-terminus and/or the C-terminus of an illustrative binary peptide disclosed above, wherein the two amino acid spacer sequence Z₁Z₂ sequence can be one or more of GS, WN, WQ, MA, and MV.

[0346] In some embodiments, the insecticidal and/or nematicidal protein for use in methods described above can comprise a cleavable tertiary peptide having one or more of the following illustrative amino acid sequences (ZXY or XYZ): AFVRLFGS (SEQ ID NO: 1649), AKLFVGS (SEQ ID NO: 1650), ALFALKGS (SEQ ID NO: 1651), ALFLKGS (SEQ ID NO: 1652), ALFLRGS (SEQ ID NO: 1653), ALFRGS (SEQ ID NO: 1654), ALFRLRGS (SEQ ID NO: 1655), ALKALFGS (SEQ ID NO: 1656), ALKFFGS (SEQ ID NO: 1657), ALKFLVGS (SEQ ID NO: 1658), ALKIFVGS (SEQ ID NO: 1659), ALKLFVGS (SEQ ID NO: 1660), FFADIKGS (SEQ ID NO: 1661), FFALKGS (SEQ ID NO: 1662), FFLKGS (SEQ ID NO: 1663), FFLRGS (SEQ ID NO: 1664), FFRLRGS (SEQ ID NO: 1665), FGYRIKGS (SEQ ID NO: 1666), FLRLFGS (SEQ ID NO: 1667), FYARRGS (SEQ ID NO: 1668), GGLRKKGS (SEQ ID NO: 1669), IFVALKGS (SEQ ID NO: 1670), IFVLKGS (SEQ ID NO: 1671), IFVLRGS (SEQ ID NO: 1672), IFVRGS (SEQ ID NO: 1673), IFVRLRGS (SEQ ID NO: 1674), ILFNIKGS (SEQ ID NO: 1675), LFAAPFGS (SEQ ID NO: 1676), LFVALKGS (SEQ ID NO: 1677), LFVLKGS (SEQ ID NO: 1678), LFVLRGS (SEQ ID NO: 1679), LFVRGS (SEQ ID NO: 1680), LFVRLRGS (SEQ ID NO: 1681), LFVRVFLGS (SEQ ID NO: 1682), LGERGS (SEQ ID NO: 1683), LKALFGS (SEQ ID NO: 1684), LKFFGS (SEQ ID NO: 1685), LKIFVGS (SEQ ID NO: 1686), LKLFVGS (SEQ ID NO: 1687), LRALFGS (SEQ ID NO: 1688), LRFFGS (SEQ ID NO: 1689), LRIFVGS (SEQ ID NO: 1690), LRLFVGS (SEQ ID NO: 1691), RALFGS (SEQ ID NO: 1692), RIFVGS (SEQ ID NO: 1693), RLFVGS (SEQ ID NO: 1694), RLRALFGS (SEQ ID NO: 1695), RLRFFGS (SEQ ID NO: 1696), RLRIFVGS (SEQ ID NO: 1697), RLRLFVGS (SEQ ID NO: 1698), RRKAFVGS (SEQ ID NO: 1699), RRKLIFGS (SEQ ID NO: 1700), RRRFFAGS (SEQ ID NO: 1701), VFGRKGGS (SEQ ID NO: 1702), YFVRKGS (SEQ ID NO: 1703), GSAFVRLF (SEQ ID NO: 1704), GSAKLFV (SEQ ID NO: 1705), GSALFALK (SEQ ID NO: 1706), GSALFLK (SEQ ID NO: 1707), GSALFLR (SEQ ID NO: 1708), GSALFR (SEQ ID NO: 1709), GSALFRLR (SEQ ID NO: 1710), GSALKALF (SEQ ID NO: 1711), GSALKFF (SEQ ID NO: 1712), GSALKFLV (SEQ ID NO: 1713), GSALKIFV (SEQ ID NO: 1714), GSALKLFV (SEQ ID NO: 1715), GSFFADIK (SEQ ID NO: 1716), GSFFALK (SEQ ID NO: 1717), GSFFLK (SEQ ID NO: 1718), GSFFLR (SEQ ID NO: 1719), GSFFRLR (SEQ ID NO: 1720), GSFGYRIK (SEQ ID NO: 1721), GSFLRLF (SEQ ID NO: 1722), GSFYARR (SEQ ID NO: 1723), GSGGLRKK (SEQ ID NO: 1724), GSIFVALK (SEQ ID NO: 1725), GSIFVLK (SEQ ID NO: 1726), GSIFVLR (SEQ ID NO: 1727), GSIFVR (SEQ ID NO: 1728), GSIFVRLR (SEQ ID NO: 1729), GSILFNIK (SEQ ID NO: 1730), GSLFAAPF (SEQ ID NO: 1731), GSLFVALK (SEQ ID NO: 1732), GSLFVLK (SEQ ID NO: 1733), GSLFVLR (SEQ ID NO: 1734), GSLFVR (SEQ ID NO: 1735), GSLFVRLR (SEQ ID NO: 1736), GSLFVRVFL (SEQ ID NO: 1737), GSLGER (SEQ ID NO: 1738), GSLKALF (SEQ ID NO: 1739), GSLKFF (SEQ ID NO: 1740), GSLKIFV (SEQ ID NO: 1741), GSLKLFV (SEQ ID NO: 1742), GSLRALF (SEQ ID NO: 1743), GSLRFF (SEQ ID NO: 1744), GSLRIFV (SEQ ID NO: 1745), GSLRLFV (SEQ ID NO: 1746), GSRALF (SEQ ID NO: 1747), GSRIFV (SEQ ID NO: 1748), GSRLFV (SEQ ID NO: 1749), GSRLRALF (SEQ ID NO: 1750), GSRLRFF (SEQ ID NO: 1751), GSRLRIFV (SEQ ID NO: 1752), GSRLRLFV (SEQ ID NO: 1753), GSRRKAFV (SEQ ID NO: 1754), GSRRKLIF (SEQ ID NO: 1755), GSRRRFFA (SEQ ID NO: 1756), GSVFGRKG (SEQ ID NO: 1757), and GSYFVRK (SEQ ID NO: 1758).

[0347] In various embodiments, the insecticidal and/or nematicidal protein for use in methods described above may be encoded by a polynucleotide that encodes a cleavable tertiary peptide having the amino acid sequence of a binary peptide as described above and herein, with the addition of a spacer to the N-terminus of the binary peptide, and/or to the C-terminus of the binary peptide, wherein the spacer is an amino acid or peptide comprising 1 to 4 amino acids, preferably two amino acids, for example GS, WN, WQ, MA, or MV. Other specific spacer examples and optimal amino acids for use as spacers are provided below. In related embodiments of the above, TPs useful in the manufacture of a DNA construct or polynucleotide encoding: (1) an insecticidal and/or nematicidal protein, which may include one or more ICK TPs, for example, a TP selected from an “ACTX” or “ACTX peptide” family of insecticidal ICK peptides that have been isolated from an Australian funnel-web spiders belonging to the Atracinae subfamily, for example, one or more TPs selected from an Omega-ACTX TP, a Kappa-ACTX TP and an U-ACTX TP, for example, U+2-ACTX-Hv1a, U-ACTX-Hv1a, rU-ACTX-Hv1a, rU-ACTX-Hv1b (wherein the TPs, if more than one, may be the same or different), or a TP having at least 80%, at least 85%, at least 90%, at least 95%, at least 96%, at least 97%, at least 98%, at least 99%, or at least 100% sequence identity or sequence homology to a peptide or protein having an amino acid sequence as set forth in SEQ ID NOs: 5, 6 and 1761, 1762, 1767, 1771-1773, and variants thereof, (wherein the TPs, if more than one, may be the same or different) and each insecticidal and/or nematicidal protein further comprising one or more tertiary peptides (designated above as L), which may include the amino acid sequence of a binary peptide selected from IFVRLR (SEQ ID NO: 1619), ALKLFV (SEQ ID NO: 1605), ALKFLV (SEQ ID NO: 1603), RRKAFV (SEQ ID NO: 1644), or LFAAPF (SEQ ID NO: 1621), fused in frame either on the N-terminus, C-terminus or both termini of the binary peptide with a Z region or spacer sequence selected from the group of or consisting of GS, WN, WQ, MA, MV, AM, LH, MN, ES, WQ, or DT.

[0348] Exemplary binary and tertiary peptides, for example, ALKLFV (SEQ ID NO: 1605), ALKFLV (SEQ ID NO: 1603) or IFVRLR (SEQ ID NO: 1619), fused to one or more TPs as described herein may be used to produce an insecticidal and/or nematicidal protein which when expressed and synthesized by a transgenic plant can fight a pest infection. In various embodiments, the method for controlling a pest infection of a plant includes planting a seed or a plant in a field, wherein the plant or seed is operable to express an insecticidal and/or nematicidal protein in the plant or the application of a composition containing an insecticidal and/or nematicidal protein comprising one or more TP proteins selected from the group consisting of a Pore Forming Insecticidal Protein (PFIP) and a Cysteine Rich Insecticidal Protein (CRIP), for example, the TP may be an Inhibitor Cysteine Knot (ICK) motif protein, a non-ICK protein, a Bt protein or any combination of these, and growing the plant or seed in the field which in the presence of the pest, is able to continue to survive and/or grow in the field in the presence of the pest. In such embodiments, the pest infection is reduced, by the death of at least a portion of the pests, after consuming the plant expressing the insecticidal and/or nematicidal protein or coated at least in part, with the insecticidal and/or nematicidal protein. In one embodiment, the TP useful in the method for controlling a pest infection can include an Inhibitor Cysteine Knot (ICK) motif protein derived from, or originates from, Hadronyche versuta, Atrax robustus, Atrax formidabilis, Atrax infensus, including TPs known as U-ACTX polypetides, U-ACTX-Hv1a, rU-ACTX-Hv1a, rU-ACTX-Hv1b, selected from an Omega-ACTX TP, a Kappa-ACTX TP and an U-ACTX TP, for example, U+2-ACTX-Hv1a, U-ACTX-Hv1a, rU-ACTX-Hv1a, rU-ACTX-Hv1b, or a hybrid-ACTX-Hv1a peptide, or a TP having at least 80%, at least 85%, at least 90%, at least 95%, at least 96%, at least 97%, at least 98%, at least 99%, or at least 100% sequence identity or sequence homology to a peptide or protein having an amino acid sequence as set forth in SEQ ID NOs: 5, 6 and 1761, 1762, 1767, 1771-1773, and mutants or variants thereof.

[0349] In some embodiments, the method of controlling a pest infection of a plant provides a pesticidally effective amount of one or more TPs synthesized by the plant or part thereof, in the form of an insecticidal and/or nematicidal protein. In some embodiments, an insecticidal and/or nematicidal protein comprising one or more TPs that are cleavable upon exposure to the gut environment of an insect and/or nematode can be produced from a DNA construct transformed into a plant or part thereof. In some embodiments, an exemplary DNA construct encodes one or more insecticidal and/or nematicidal proteins, each insecticidal and/or nematicidal protein comprises an ERSP fused in frame with the N-terminus of a binary or tertiary peptide, and the binary or tertiary peptide is fused in frame with a construct comprising (TP-L)ₙ or (L-TP)ₙ, wherein each TP is toxic protein, L is a binary or tertiary peptide and n is an integer ranging from 1 to 200 and wherein the C-terminal TP is fused or unfused at its C-terminus with a binary or tertiary peptide. When n is greater than 1, each TP and each L may be the same or different.

[0350] In other embodiments, an exemplary method for controlling such a pest infection includes providing in a diet of the pest, a plant, or part thereof, wherein the plant or part thereof, contains and expresses a polynucleotide which encodes an insecticidal and/or nematicidal insecticidal and/or nematicidal protein comprising one or more TPs as described herein. In some embodiments, the plant expresses a polynucleotide constitutively, or inducibly. The polynucleotide may be operably linked to an operable promoter, for example, a homologous or heterologous promoter, wherein the polynucleotide encodes an insecticidal and/or nematicidal protein having one or more cleavable binary or tertiary peptides. The insecticidal and/or nematicidal protein can include the structure: (ERSP)-(TP-L)ₙ, or (ERSP)-(L)-(TP-L)ₙ, or (ERSP)-(L-TP)ₙ, or (ERSP)-(L-TP)ₙ-(L). In another embodiment, a plant, or part thereof comprises a polynucleotide operably linked to an operable promoter, for example, a homologous or heterologous promoter, wherein the polynucleotide encodes an insecticidal and/or nematicidal protein comprising an ERSP fused in frame with the N-terminus of a stabilizing domain (STA). The STA is fused in frame with either the N-terminus of a binary or tertiary peptide, or the N-terminus of a construct comprising: (L-TP)ₙ, (L-TP)ₙ-L, (TP-L)ₙ, or L-(TP-L)ₙ. In various embodiments, an exemplary insecticidal and/or nematicidal protein can include a construct from N-terminus to C-terminus: (ERSP)-(L)-TP-(L)-TP, (ERSP)-(L)-TP-(L)-TP-(L), (L-TP)ₙ-L, (L-TP-L)ₙ, (ERSP)-(TP-L)ₙ, (ERSP)-(L)-(TP-L)ₙ, (ERSP)-(L-TP)ₙ, (ERSP)-(L-TP)ₙ-(L), (ERSP)-(STA)-(L-TP)ₙ, (ERSP)-(STA)-(L-TP)ₙ-(L), (ERSP)-(STA)-(TP-L)ₙ, or (ERSP)-(STA)-(L)-(TP-L)ₙ, or (STA)-(L-TP)ₙ, or (STA)-(L-TP)ₙ-(L), or (STA)-(TP-L)ₙ, or (STA)-(L)-(TP-L)ₙ, wherein (L) is a binary peptide or a tertiary peptide, and which each L may be the same or different, TP is a toxic peptide, which may be the same or different, and n is an integer ranging from 1 to 200, preferably 1 to 100, and most preferably, 1 to 10. In some embodiments, the insecticidal and/or nematicidal protein may contain TPs that are the same or different, and binary and/or tertiary peptides that are the same or different. The TPs useful in the transgenic plants or parts thereof disclosed herein, can have at least 50%, 55%, 60%, 65%, 70%, 75%, 80%, 85%, 90%, 95%, 96%, 97%, 98%, or 99% or greater sequence identity to SEQ ID NOs: 5 or 6, SEQ ID NO: 33 and/or a peptide selected from SEQ ID NOs: 33-1032 and variants thereof. In some embodiments, the C-terminal TP is fused or unfused at its C-terminus with a binary or tertiary peptide. In related embodiments of the above, TPs useful in the manufacture of a DNA construct or polynucleotide encoding: (1) an insecticidal and/or nematicidal protein, which may include one or more ICK TPs, for example, a TP selected from an “ACTX” or “ACTX peptide” family of insecticidal ICK peptides that have been isolated from an Australian funnel-web spiders belonging to the Atracinae subfamily, for example, one or more TPs selected from an Omega-ACTX TP, a Kappa-ACTX TP and an U-ACTX TP, for example, U+2-ACTX-Hv1a, U-ACTX-Hv1a, rU-ACTX-Hv1a, rU-ACTX-Hv1b, or a TP having at least 80%, at least 85%, at least 90%, at least 95%, at least 96%, at least 97%, at least 98%, at least 99%, or at least 100% sequence identity or sequence homology to a peptide or protein having an amino acid sequence as set forth in SEQ ID NOs: 5, 6 and 1761, 1762, 1767, 1771-1773, and variants thereof, (wherein the TPs, if more than one, may be the same or different) and wherein the DNA construct or polynucleotide further encodes (2) one or more tertiary peptides (designated above as L) fused in frame to at least one binary or tertiary peptide, which may include the amino acid sequence of a binary peptide selected from IFVRLR (SEQ ID NO: 1619), ALKLFV (SEQ ID NO: 1605), ALKFLV (SEQ ID NO: 1603), RRKAFV (SEQ ID NO: 1644), or LFAAPF (SEQ ID NO: 1621), fused in frame either on the N-terminus, C-terminus or both termini of the binary peptide with a Z region or spacer sequence selected from the group of or consisting of GS, WN, WQ, MA, MV, AM, LH, MN, ES, WQ, or DT.

[0351] In some embodiments, methods for controlling an insect and/or a nematode pest infection or infestation, may include the creation of a transgenic plant comprising a combination of insecticidal and/or nematicidal proteins, each insecticidal and/or nematicidal protein including a Bt (Bacillus thuringiensis) TP or an ICK (Inhibitor Cystine Knot) TP which when predated upon by said insect and/or nematode, will exert insecticidal and/or nematicidal activity and control or reduce or eliminate the pest infection and/or infestation. This plant can be made from independent stable genetic insertions of DNA that create a flowering plant expressing a Bt TP and a second flowering plant expressing a ICK TP. The pollen of one of those plants will be crossed onto the female flower organs of the other plant to form a genetic hybridization that contains both the Bt TP and the ICK TP genetic traits. The progeny of that sexual cross and further crossing that results in the inheritance of both traits will result in a transgenic plant comprising a combination of a Bt (Bacillus thuringiensis) TP and an ICK (Inhibitor Cystine Knot) TP to said insect and/or nematode.

[0352] In some embodiments, the DNA constructs described herein may encode insecticidal and/or nematicidal proteins that contain specific TPs that are suited to treat a specific pest infestation in a specific plant or groups of plants, for example, a particular type of crop. In one embodiment, insecticidal and/or nematicidal proteins of the present invention may comprise a TP selected from one or more of: Cry 1A.105, Cry2Ab2, Cry1F, Cry3Bb1, Cry34Ab1 and Cry35Ab1. These TPs may be expressed singly or in combinations to treat a specific crop, for example, corn. In some embodiments, insecticidal and/or nematicidal proteins having the structure from N-terminus to C-terminus: (ERSP)-(L)-TP-(L)-TP, (ERSP)-(L)-TP-(L)-TP-(L), (L-TP)ₙ-L, (L-TP-L)ₙ, (ERSP)-(TP-L)ₙ, (ERSP)-(L)-(TP-L)ₙ, (ERSP)-(L-TP)ₙ, (ERSP)-(L-TP)ₙ-(L), (ERSP)-(STA)-(L-TP)ₙ, (ERSP)-(STA)-(L-TP)ₙ-(L), (ERSP)-(STA)-(TP-L)ₙ, or (ERSP)-(STA)-(L)-(TP-L)ₙ, or (STA)-(L-TP)ₙ, or (STA)-(L-TP)ₙ-(L), or (STA)-(TP-L)ₙ, or (STA)-(L)-(TP-L)ₙ, wherein (L) is a binary peptide or a tertiary peptide, and which each L may be the same or different, TP is a toxic peptide, which may be the same or different, and n is an integer ranging from 1 to 200, preferably 1 to 100, and most preferably, 1 to 10. In some embodiments, the insecticidal and/or nematicidal protein may contain TPs that are the same or different, and binary and/or tertiary peptides that are the same or different, wherein TP is toxic protein selected from Cry 1A.105, Cry2Ab2, Cry1F, Cry3Bb1, Cry34Ab1 and Cry35Ab1, or combinations thereof, and L is a binary or tertiary peptide and n is an integer ranging from 1 to 200, preferably an integer ranging from 1 to 100, and more preferably an integer ranging from 1 to 10 can be used to treat the following corn pests: European corn borer (ECB) Southwestern corn borer (SWCB) Southern cornstalk borer (SCSB), Corn earworm (CEW), Fall armyworm (FAW), Stalk borer, Lesser corn stalk borer, Sugarcane borer (SCB), Western bean cutworm (WBC), Black cutworm, Western com rootworm (WCRW), Northern corn rootworm (NCRW), or Mexican corn rootworm. (MCRW).

[0353] In other embodiments, insecticidal and/or nematicidal proteins having the structure from N-terminus to C-terminus: (ERSP)-(L)-TP-(L)-TP, (ERSP)-(L)-TP-(L)-TP-(L), (L-TP)ₙ-L, (L-TP-L)ₙ, (ERSP)-(TP-L)ₙ, (ERSP)-(L)-(TP-L)ₙ, (ERSP)-(L-TP)ₙ, (ERSP)-(L-TP)ₙ-(L), (ERSP)-(STA)-(L-TP)ₙ, (ERSP)-(STA)-(L-TP)ₙ-(L), (ERSP)-(STA)-(TP-L)ₙ, or (ERSP)-(STA)-(L)-(TP-L)ₙ, or (STA)-(L-TP)ₙ, or (STA)-(L-TP)ₙ-(L), or (STA)-(TP-L)ₙ, or (STA)-(L)-(TP-L)ₙ, wherein (L) is a binary peptide or a tertiary peptide, and which each L may be the same or different, TP is a toxic peptide, which may be the same or different, and n is an integer ranging from 1 to 200, preferably 1 to 100, and most preferably, 1 to 10. In some embodiments, the insecticidal and/or nematicidal protein may contain TPs that are the same or different, and binary and/or tertiary peptides that are the same or different, wherein TP is cotton Cry 1AC, can be used to treat the following cotton PIP (Bollgard I and II—first one gene, then two genes) pests: cotton bollworm (CBW) Helicoverpa zea (Boddie), tobacco budworm (TBW) Heliothis virescens, and pink bollworm (PBW) Pectinophora gossypiella (Sanders). In a related embodiment, insecticidal and/or nematicidal proteins having the structure from N-terminus to C-terminus: (ERSP)-(L)-TP-(L)-TP, (ERSP)-(L)-TP-(L)-TP-(L), (L-TP)ₙ-L, (L-TP-L)ₙ, (ERSP)-(TP-L)ₙ, (ERSP)-(L)-(TP-L)ₙ, (ERSP)-(L-TP)ₙ, (ERSP)-(L-TP)ₙ-(L), (ERSP)-(STA)-(L-TP)ₙ, (ERSP)-(STA)-(L-TP)ₙ-(L), (ERSP)-(STA)-(TP-L)ₙ, or (ERSP)-(STA)-(L)-(TP-L)ₙ, or (STA)-(L-TP)ₙ, or (STA)-(L-TP)ₙ-(L), or (STA)-(TP-L)ₙ, or (STA)-(L)-(TP-L)ₙ, wherein (L) is a binary peptide or a tertiary peptide, and which each L may be the same or different, TP is a toxic peptide, which may be the same or different, and n is an integer ranging from 1 to 200, preferably 1 to 100, and most preferably, 1 to 10. In some embodiments, the insecticidal and/or nematicidal protein may contain TPs that are the same or different, and binary and/or tertiary peptides that are the same or different, wherein TP is Cotton Cry1Ac and/or Cry2Ab, can be used to treat the following cotton pests: cotton bollworm (CBW) Helicoverpa zea (Boddie), tobacco budworm (TBW) Heliothis virescens, pink bollworm (PBW) Pectinophora gossypiella (Sanders), Fall armyworm (FAW), Beet armyworm (BAW), and Soybean looper (SBL).

[0354] In other embodiments, insecticidal and/or nematicidal proteins having the structure from N-terminus to C-terminus: (ERSP)-(L)-TP-(L)-TP, (ERSP)-(L)-TP-(L)-TP-(L), (L-TP)ₙ-L, (L-TP-L)ₙ, (ERSP)-(TP-L)ₙ, (ERSP)-(L)-(TP-L)ₙ, (ERSP)-(L-TP)ₙ, (ERSP)-(L-TP)ₙ-(L), (ERSP)-(STA)-(L-TP)ₙ, (ERSP)-(STA)-(L-TP)ₙ-(L), (ERSP)-(STA)-(TP-L)ₙ, or (ERSP)-(STA)-(L)-(TP-L)ₙ, or (STA)-(L-TP)ₙ, or (STA)-(L-TP)ₙ-(L), or (STA)-(TP-L)ₙ, or (STA)-(L)-(TP-L)ₙ, wherein (L) is a binary peptide or a tertiary peptide, and which each L may be the same or different, TP is a toxic peptide, which may be the same or different, and n is an integer ranging from 1 to 200, preferably 1 to 100, and most preferably, 1 to 10. In some embodiments, the insecticidal and/or nematicidal protein may contain TPs that are the same or different, and binary and/or tertiary peptides that are the same or different, wherein TP is Soybean Cry1Ac, can be used to treat the following soyabean PIP pests: velvetbean caterpillar (Anticarcia gemmatalis), soybean looper (Pseudoplusia includens), soybean anxil borer (Epinotia aporema), and sunflower looper (Rachiplusia nu).

[0355] In some embodiments, the method provides transforming a plant cell or a plurality of plant cells with a DNA construct which encodes insecticidal and/or nematicidal insecticidal and/or nematicidal protein containing compositions. The transformed plant may be a recombinant plant, a part of the plant, or a product of the plant or the plant part. While transformation of a plant or plant part may be pursued, the insecticidal and/or nematicidal compositions may be produced recombinantly in host cells including a bacterial host cell, a yeast host cell, a plant host cell or an animal host cell. In some embodiments, the insecticidal and/or nematicidal protein comprising an ERSP, one or more cleavable linking peptides and one or more TPs can be synthesized in a yeast production strain or in a bacterial production strain to produce milligram, gram or kilogram quantities of the insecticidal and/or nematicidal protein for application to a plurality of plants or a field of plants, i.e., crops to control or prevent a pest infection. In some embodiments, a pesticidally effective amount of the insecticidal and/or nematicidal protein can be provided in one or more formulations topically applied on the plant or a part of the plant, wherein the insecticidal and/or nematicidal protein is formulated in bacterial cells, bacterial spores, fungal cells, fungal spores, or parasporal crystals that comprise the insecticidal and/or nematicidal protein. Alternatively, the insecticidal and/or nematicidal compositions containing the insecticidal and/or nematicidal proteins can be applied directly to the surface of the plants.

[0356] As used herein, pesticidally effective amounts of the insecticidal and/or nematicidal proteins described herein includes any amount that may inhibit the growth, impair the movement, or even kill an insect and/or nematode when the TP cleaved from the insecticidal and/or nematicidal protein is appropriately delivered to the locus inhabited by the insect and/or nematode. In various embodiments, the insecticidal and/or nematicidal protein containing compositions can be formulated as powders, emulsions, solutions, granules, micronized particles, and the like and other formulations and forms of compositions used in the art for applying insecticidal proteins such as Bt proteins that can be applied to the surface of the plants for which pest control is desired. Amounts of TPs thus distributed assuming at least 50% cleavage and release of the TPs from the insecticidal and/or nematicidal protein can be quantified using C₁₈ rpHPLC methods known by those skilled in the art.

[0357] In the embodiments described herein, the present insecticidal and/or nematicidal proteins comprising one or more TPs and one or more cleavable linkers are effective against a variety of insects and nematodes. The methods provided herein can be used to control, or prevent, or reduce the severity of a pest infection, to kill insects and/or nematodes which consume plants or parts thereof in their diets, to optimize the growth potential of a plant, to increase the yield of a crop susceptible to a pest infection, and various other methods requiring the control and/or elimination of insects and/or nematodes which predate on plant tissue. Various types of insects and nematodes susceptible to the methods, compositions and procedures described herein are as follows.

[0358] Insect and nematodes: Insects may be selected from the orders Coleoptera, Diptera, Hymenoptera, Lepidoptera, Mallophaga, Homoptera, Hemiptera, Orthroptera, Thysanoptera, Dermaptera, Isoptera, Anoplura, Siphonaptera, Trichoptera, and the like. More particularly, insect pests include Coleoptera, Lepidoptera, and Diptera.

[0359] Insects of suitable agricultural, household and/or medical/veterinary importance for treatment with the insecticidal polypeptides include, but are not limited to, members of the following classes and orders.

[0360] The order Coleoptera includes the suborders Adephaga and Polyphaga. Suborder Adephaga includes the superfamilies Caraboidea and Gyrinoidea. Suborder Polyphaga includes the superfamilies Hydrophiloidea, Staphylinoidea, Cantharoidea, Cleroidea, Elateroidea, Dascilloidea, Dryopoidea, Byrrhoidea, Cucujoidea, Meloidea, Mordelloidea, Tenebrionoidea, Bostrichoidea, Scarabaeoidea, Cerambycoidea, Chrysomeloidea, and Curculionoidea. Superfamily Caraboidea includes the families Cicindelidae, Carabidae, and Dytiscidae. Superfamily Gyrinoidea includes the family Gyrinidae. Superfamily Hydrophiloidea includes the family Hydrophilidae. Superfamily Staphylinoidea includes the families Silphidae and Staphylinidae. Superfamily Cantharoidea includes the families Cantharidae and Lampyridae. Superfamily Cleroidea includes the families Cleridae and Dermestidae. Superfamily Elateroidea includes the families Elateridae and Buprestidae. Superfamily Cucujoidea includes the family Coccinellidae. Superfamily Meloidea includes the family Meloidae. Superfamily Tenebrionoidea includes the family Tenebrionidae. Superfamily Scarabaeoidea includes the families Passalidae and Scarabaeidae. Superfamily Cerambycoidea includes the family Cerambycidae. Superfamily Chrysomeloidea includes the family Chrysomelidae. Superfamily Curculionoidea includes the families Curculionidae and Scolytidae.

[0361] Examples of Coleoptera include, but are not limited to: the American bean weevil Acanthoscelides obtectus, the leaf beetle Agelastica alni, click beetles (Agriotes lineatus, Agriotes obscurus, Agriotes bicolor), the grain beetle Ahasverus advena, the summer schafer Amphimallon solstitialis, the furniture beetle Anobium punctatum, Anthonomus spp. (weevils), the Pygmy mangold beetle Atomaria linearis, carpet beetles (Anthrenus spp., Attagenus spp.), the cowpea weevil Callosobruchus maculates, the fried fruit beetle Carpophilus hemipterus, the cabbage seedpod weevil Ceutorhynchus assimilis, the rape winter stem weevil Ceutorhynchus picitarsis, the wireworms Conoderus vespertinus and Conoderus falli, the banana weevil Cosmopolites sordidus, the New Zealand grass grub Costelytra zealandica, the June beetle Cotinis nitida, the sunflower stem weevil Cylindrocopturus adspersus, the larder beetle Dermestes lardarius, the corn rootworms Diabrotica virgifera, Diabrotica virgifera virgifera, and Diabrotica barberi, the Mexican bean beetle Epilachna varivestis, the old house borer Hylotropes bajulus, the lucerne weevil Hypera postica, the shiny spider beetle Gibbium psylloides, the cigarette beetle Lasioderma serricorne, the Colorado potato beetle Leptinotarsa decemlineata, Lyctus beetles' (Lyctus spp.), the pollen beetle Meligethes aeneus, the common cockshafer Melolontha melolontha, the American spider beetle Mezium americanum, the golden spider beetle Niptus hololeucus, the grain beetles Oryzaephilus surinamensis and Oryzaephilus mercator, the black vine weevil Otiorhynchus sulcatus, the mustard beetle Phaedon cochleariae, the crucifer flea beetle Phyllotreta cruciferae, the striped flea beetle Phyllotreta striolata, the cabbage steam flea beetle Psylliodes chrysocephala, Ptinus spp. (spider beetles), the lesser grain borer Rhizopertha dominica, the pea and been weevil Sitona lineatus, the rice and granary beetles Sitophilus oryzae and Sitophilus granaries, the red sunflower seed weevil Smicronyx fulvus, the drugstore beetle Stegobium paniceum, the yellow mealworm beetle Tenebrio molitor, the flour beetles Tribolium castaneum and Tribolium confusum, warehouse and cabinet beetles (Trogoderma spp.), and the sunflower beetle Zygogramma exclamation's.

[0362] Examples of Dermaptera (earwigs) include, but are not limited to: the European earwig Forficula auricularia, and the striped earwig Labidura riparia.

[0363] Examples of Dictvontera include, but are not limited to: the oriental cockroach Blatta orientalis, the German cockroach Blatella germanica, the Madeira cockroach Leucophaea maderae, the American cockroach Periplaneta americana, and the smokybrown cockroach Periplaneta fuliginosa.

[0364] Examples of Diplonoda include, but are not limited to: the spotted snake millipede Blaniulus guttulatus, the flat-back millipede Brachydesmus superus, and the greenhouse millipede Oxidus gracilis.

[0365] The order Diptera includes the Suborders Nematocera, Brachycera, and Cyclorrhapha. Suborder Nematocera includes the families Tipulidae, Psychodidae, Culicidae, Ceratopogonidae, Chironomidae, Simuliidae, Bibionidae, and Cecidomyiidae. Suborder Brachycera includes the families Stratiomyidae, Tabanidae, Therevidae, Asilidae, Mydidae, Bombyliidae, and Dolichopodidae. Suborder Cyclorrhapha includes the Divisions Aschiza and Aschiza. Division Aschiza includes the families Phoridae, Syrphidae, and Conopidae. Division Aschiza includes the Sections Acalyptratae and Calyptratae. Section Acalyptratae includes the families Otitidae, Tephritidae, Agromyzidae, and Drosophilidae. Section Calyptratae includes the families Hippoboscidae, Oestridae, Tachinidae, Anthomyiidae, Muscidae, Calliphoridae, and Sarcophagidae.

[0366] Examples of Diptera include, but are not limited to: the house fly (Musca domestica), the African tumbu fly (Cordylobia anthropophaga), biting midges (Culicoides spp.), bee louse (Braula spp.), the beet fly Pegomyia betae, black flies (Cnephia spp., Eusimulium spp., Simulium spp.), bot flies (Cuterebra spp., Gastrophilus spp., Oestrus spp.), craneflies (Tipula spp.), eye gnats (Hippelates spp.), filth-breeding flies (Calliphora spp., Fannia spp., Hermetia spp., Lucilia spp., Musca spp., Muscina spp., Phaenicia spp., Phormia spp.), flesh flies (Sarcophaga spp., Wohlfahrtia spp.); the flit fly Oscinella frit, fruitflies (Dacus spp., Drosophila spp.), head and canon flies (Hydrotea spp.), the hessian fly Mayetiola destructor, horn and buffalo flies (Haematobia spp.), horse and deer flies (Chrysops spp., Haematopota spp., Tabanus spp.), louse flies (Lipoptena spp., Lynchia spp., and Pseudolynchia spp.), medflies (Ceratitus spp.), mosquitoes (Aedes spp., Anopheles spp., Culex spp., Psorophora spp.), sandflies (Phlebotomus spp., Lutzomyia spp.), screw-worm flies (Chtysomya bezziana and Cochliomyia hominivorax), sheep keds (Melophagus spp.); stable flies (Stomoxys spp.), tsetse flies (Glossina spp.), and warble flies (Hypoderma spp.).

[0367] Examples of Isontera (termites) include, but are not limited to: species from the familes Hodotennitidae, Kalotermitidae, Mastotermitidae, Rhinotennitidae, Serritermitidae, Termitidae, Termopsidae.

[0368] Examples of Heteroptera include, but are not limited to: the bed bug Cimex lectularius, the cotton stainer Dysdercus intermedius, the Sunn pest Eurygaster integriceps, the tarnished plant bug Lygus lineolaris, the green stink bug Nezara antennata, the southern green stink bug Nezara viridula, and the triatomid bugs Panstrogylus megistus, Rhodnius ecuadoriensis, Rhodnius pallescans, Rhodnius prolixus, Rhodnius robustus, Triatoma dimidiata, Triatoma infestans, and Triatoma sordida.

[0369] Examples of Homoptera include, but are not limited to: the California red scale Aonidiella aurantii, the black bean aphid Aphisfabae, the cotton or melon aphid Aphis gossypii, the green apple aphid Aphis pomi, the citrus spiny whitefly Aleurocanthus spiniferus, the oleander scale Aspidiotus hederae, the sweet potato whitefly Bemesia tabaci, the cabbage aphid Brevicoryne brassicae, the pear psylla Cacopsylla pyricola, the currant aphid Cryptomyzus ribis, the grape phylloxera Daktulosphaira vitifoliae, the citrus psylla Diaphorina citri, the potato leafhopper Empoascafabae, the bean leafhopper Empoasca solana, the vine leafhopper Empoasca vitis, the woolly aphid Eriosoma lanigerum, the European fruit scale Eulecanium corni, the mealy plum aphid Hyalopterus arundinis, the small brown planthopper Laodelphax striatellus, the potato aphid Macrosiphum euphorbiae, the green peach aphid Myzus persicae, the green rice leafhopper Nephotettix cinticeps, the brown planthopper Nilaparvata lugens, gall-forming aphids (Pemphigus spp.), the hop aphid Phorodon humuli, the bird-cherry aphid Rhopalosiphum padi, the black scale Saissetia oleae, the greenbug Schizaphis graminum, the grain aphid Sitobion avenae, and the greenhouse whitefly Trialeurodes vaporariorum.

[0370] Examples of Isopoda include, but are not limited to: the common pillbug Armadillidium vulgare and the common woodlouse Oniscus asellus.

[0371] The order Lepidoptera includes the families Papilionidae, Pieridae, Lycaenidae, Nymphalidae, Danaidae, Satyridae, Hesperiidae, Sphingidae, Saturniidae, Geometridae, Arctiidae, Noctuidae, Lymantriidae, Sesiidae, and Tineidae.

[0372] Examples of Lepidoptera include, but are not limited to: Adoxophyes orana (summer fruit tortrix moth), Agrotis ipsolon (black cutworm), Archips podana (fruit tree tortrix moth), Bucculatrix pyrivorella (pear leafminer), Bucculatrix thurberiella (cotton leaf perforator), Bupalus piniarius (pine looper), Carpocapsa pomonella (codling moth), Chilo suppressalis (striped rice borer), Choristoneura fumiferana (eastern spruce budworm), Cochylis hospes (banded sunflower moth), Diatraea grandiosella (southwestern corn borer), Earls insulana (Egyptian bollworm), Euphestia kuehniella (Mediterranean flour moth), Eupoecilia ambiguella (European grape berry moth), Euproctis chrysorrhoea (brown-tail moth), Euproctis subflava (oriental tussock moth), Galleria mellonella (greater wax moth), Helicoverpa armigera (cotton bollworm), Helicoverpa zea (cotton bollworm), Heliothis virescens (tobacco budworm), Hofmannophila pseudopretella (brown house moth), Homeosoma electellum (sunflower moth), Homona magnanima (oriental tea tree tortrix moth), Lithocolletis blancardella (spotted tentiform leafminer), Lymantria dispar (gypsy moth), Malacosoma neustria (tent caterpillar), Mamestra brassicae (cabbage armyworm), Mamestra configurata (Bertha armyworm), the hornworms Manduca sexta and Manuduca quinquemaculata, Operophtera brumata (winter moth), Ostrinia nubilalis (European corn borer), Panolis flammea (pine beauty moth), Pectinophora gossypiella (pink bollworm), Phyllocnistis citrella (citrus leafminer), Pieris brassicae (cabbage white butterfly), Plutella xylostella (diamondback moth), Rachiplusia ni (soybean looper), Spilosoma virginica (yellow bear moth), Spodoptera exigua (beet armyworm), Spodoptera frugiperda (fall armyworm), Spodoptera littoralis (cotton leafworin), Spodoptera litura (common cutworm), Spodoptera praefica (yellowstriped armyworm), Sylepta derogata (cotton leaf roller), Tineola bisselliella (webbing clothes moth), Tineola pellionella (case-making clothes moth), Tortrix viridana (European oak leafroller), Trichoplusia ni (cabbage looper), and Yponomeuta padella (small ermine moth).

[0373] Examples of Orthoptera include, but are not limited to: the common cricket Acheta domesticus, tree locusts (Anacridium spp.), the migratory locust Locusta migratoria, the twostriped grasshopper Melanoplus bivittatus, the differential grasshopper Melanoplus dfferentialis, the redlegged grasshopper Melanoplus femurrubrum, the migratory grasshopper Melanoplus sanguinipes, the northern mole cricket Neocurtilla hexadectyla, the red locust Nomadacris septemfasciata, the shortwinged mole cricket Scapteriscus abbreviatus, the southern mole cricket Scapteriscus borellii, the tawny mole cricket Scapteriscus vicinus, and the desert locust Schistocerca gregaria.

[0374] Examples of Phthiraptera include, but are not limited to: the cattle biting louse Bovicola bovis, biting lice (Damalinia spp.), the cat louse Felicola subrostrata, the shortnosed cattle louse Haematopinus eloysternus, the tail-switch louse Haematopinus quadriperiussus, the hog louse Haematopinus suis, the face louse Linognathus ovillus, the foot louse Linognathus pedalis, the dog sucking louse Linognathus setosus, the long-nosed cattle louse Linognathus vituli, the chicken body louse Menacanthus stramineus, the poultry shaft louse Menopon gallinae, the human body louse Pediculus humanus, the pubic louse Phthirus pubis, the little blue cattle louse Solenopotes capillatus, and the dog biting louse Trichodectes canis.

[0375] Examples of Psocoptera include, but are not limited to: the booklice Liposcelis bostrychophila, Liposcelis decolor, Liposcelis entomophila, and Trogium pulsatorium.

[0376] Examples of Siphonaptera include, but are not limited to: the bird flea Ceratophyllus gallinae, the dog flea Ctenocephalides canis, the cat flea Ctenocephalides fells, the human flea Pulex irritans, and the oriental rat flea Xenopsylla cheopis.

[0377] Examples of Symphyla include, but are not limited to: the garden symphylan Scutigerella immaculate.

[0378] Examples of Thysanura include, but are not limited to: the gray silverfish Ctenolepisma longicaudata, the four-lined silverfish Ctenolepisma quadriseriata, the common silverfish Lepisma saccharina, and the firebrat Thennobia domestica.

[0379] Examples of Thysanoptera include, but are not limited to: the tobacco thrips Frankliniella fusca, the flower thrips Frankliniella intonsa, the western flower thrips Frankliniella occidentalis, the cotton bud thrips Frankliniella schultzei, the banded greenhouse thrips Hercinothrips femoralis, the soybean thrips Neohydatothrips variabilis, Kelly's citrus thrips Pezothrips kellyanus, the avocado thrips Scirtothrips perseae, the melon thrips Thrips palmi, and the onion thrips Thrips tabaci.

[0380] Examples of Nematodes include, but are not limited to: parasitic nematodes such as root-knot, cyst, and lesion nematodes, including Heterodera spp., Meloidogyne spp., and Globodera spp.; particularly members of the cyst nematodes, including, but not limited to: Heterodera glycines (soybean cyst nematode); Heterodera schachtii (beet cyst nematode); Heterodera avenae (cereal cyst nematode); and Globodera rostochiensis and Globodera pailida (potato cyst nematodes). Lesion nematodes include, but are not limited to: Pratylenchus spp.

[0381] In one embodiment, the insecticidal and nematicidal compositions comprising the polypeptides, polynucleotides, cells, vectors, etc. described herein, can be employed to treat ectoparasites. Ectoparasites include, but are not limited to: fleas, ticks, mange, mites, mosquitoes, nuisance and biting flies, lice, and combinations comprising one or more of the foregoing ectoparasites. The term “fleas” includes the usual or accidental species of parasitic flea of the order Siphonaptera, and in particular the species Ctenocephalides, in particular C. fells and C. cams, rat fleas (Xenopsylla cheopis) and human fleas (Pulex irritans).

[0382] Insect pests of the invention for the major crops include, but are not limited to: Maize: Ostrinia nubilalis, European corn borer; Agrotis ipsilon, black cutworm; Helicoverpa zea, corn earworm; Spodoptera frugiperda, fall armyworm; Diatraea grandiosella, southwestern corn borer; Elasmopalpus lignosellus, lesser cornstalk borer; Diatraea saccharalis, surgarcane borer; Diabrotica virgifera, western corn rootworm; Diabrotica longicornis barberi, northern corn rootworm; Diabrotica undecimpunctata howardi, southern corn rootworm; Melanotus spp., wireworms; Cyclocephala borealis, northern masked chafer (white grub); Cyclocephala immaculata, southern masked chafer (white grub); Popillia japonica, Japanese beetle; Chaetocnema pulicaria, corn flea beetle; Sphenophorus maidis, maize billbug; Rhopalosiphum maidis, corn leaf aphid; Anuraphis maidiradicis, corn root aphid; Blissus leucopterus leucopterus, chinch bug; Melanoplus femurrubrum, redlegged grasshopper; Melanoplus sanguinipes, migratory grasshopper; Hylemya platura, seedcorn maggot; Agromyza parvicornis, corn blot leafminer; Anaphothrips obscrurus, grass thrips; Solenopsis milesta, thief ant; Tetranychus urticae, twospotted spider mite; Sorghum: Chilo partellus, sorghum borer; Spodoptera frugiperda, fall armyworm; Helicoverpa zea, corn earworm; Elasmopalpus lignosellus, lesser cornstalk borer; Feltia subterranea, granulate cutworm; Phyllophaga crinita, white grub; Eleodes, Conoderus, and Aeolus spp., wireworms; Oulema melanopus, cereal leaf beetle; Chaetocnema pulicaria, corn flea beetle; Sphenophorus maidis, maize billbug; Rhopalosiphum maidis, corn leaf aphid; Sipha flava, yellow sugarcane aphid; Blissus leucopterus leucopterus, chinch bug; Contarinia sorghicola, sorghum midge; Tetranychus cinnabarinus, carmine spider mite; Tetranychus urticae, twospotted spider mite; Wheat: Pseudaletia unipunctata, army worm; Spodoptera frugiperda, fall armyworm; Elasmopalpus lignosellus, lesser cornstalk borer; Agrotis orthogonia, western cutworm; Elasmopalpus lignosellus, lesser cornstalk borer; Oulema melanopus, cereal leaf beetle; Hypera punctata, clover leaf weevil; Diabrotica undecimpunctata howardi, southern corn rootworm; Russian wheat aphid; Schizaphis graminum, greenbug; Macrosiphum avenae, English grain aphid; Melanoplus femurrubrum, redlegged grasshopper; Melanoplus differentialis, differential grasshopper; Melanoplus sanguinipes, migratory grasshopper; Mayetiola destructor, Hessian fly; Sitodiplosis mosellana, wheat midge; Meromyza americana, wheat stem maggot; Hylemya coarctata, wheat bulb fly; Frankliniella fusca, tobacco thrips; Cephus cinctus, wheat stem sawfly; Aceria tulipae, wheat curl mite; Sunflower: Suleima helianthana, sunflower bud moth; Homoeosoma electellum, sunflower moth; Zygogramma exclamationis, sunflower beetle; Bothyrus gibbosus, carrot beetle; Neolasioptera murtfeldtiana, sunflower seed midge; Cotton: Heliothis virescens, cotton budworm; Helicoverpa zea, cotton bollworm; Spodoptera exigua, beet armyworm; Pectinophora gossypiella, pink bollworm; Anthonomus grandis, boll weevil; Aphis gossypii, cotton aphid; Pseudatomoscelis seriatus, cotton fleahopper; Trialeurodes abutilonea, bandedwinged whitefly; Lygus lineolaris, tarnished plant bug; Melanoplus femurrubrum, redlegged grasshopper; Melanoplus differentialis, differential grasshopper; Thrips tabaci, onion thrips; Franklinkiella fusca, tobacco thrips; Tetranychus cinnabarinus, carmine spider mite; Tetranychus urticae, twospotted spider mite; Rice: Diatraea saccharalis, sugarcane borer; Spodoptera frugiperda, fall armyworm; Helicoverpa zea, corn earworm; Colaspis brunnea, grape colaspis; Lissorhoptrus oryzophilus, rice water weevil; Sitophilus oryzae, rice weevil; Nephotettix nigropictus, rice leafhopper; Blissus leucopterus leucopterus, chinch bug; Acrosternum hilare, green stink bug; Soybean: Pseudoplusia includens, soybean looper; Anticarsia gemmatalis, velvetbean caterpillar; Plathypena scabra, green cloverworm; Ostrinia nubilalis, European corn borer; Agrotis ipsilon, black cutworm; Spodoptera exigua, beet armyworm; Heliothis virescens, cotton budworm; Helicoverpa zea, cotton bollworm; Epilachna varivestis, Mexican bean beetle; Myzus persicae, green peach aphid; Empoasca fabae, potato leafhopper; Acrosternum hilare, green stink bug; Melanoplus femurrubrum, redlegged grasshopper; Melanoplus differentialis, differential grasshopper; Hylemya platura, seedcorn maggot; Sericothrips variabilis, soybean thrips; Thrips tabaci, onion thrips; Tetranychus turkestani, strawberry spider mite; Tetranychus urticae, twospotted spider mite; Barley: Ostrinia nubilalis, European corn borer; Agrotis ipsilon, black cutworm; Schizaphis graminum, greenbug; Blissus leucopterus leucopterus, chinch bug; Acrosternum hilare, green stink bug; Euschistus servus, brown stink bug; Delia platura, seedcorn maggot; Mayetiola destructor, Hessian fly; Petrobia latens, brown wheat mite; Oil Seed Rape: Brevicoryne brassicae, cabbage aphid; Phyllotreta cruciferae, Flea beetle; Mamestra configurata, Bertha armyworm; Plutella xylostella, Diamond-back moth; Delia ssp., Root maggots.

[0383] In some embodiments, the insecticidal compositions can be employed to treat combinations comprising one or more of the foregoing insects.

[0384] The insects that are susceptible to the peptides of this invention include but are not limited to the following: Blattaria, Coleoptera, Collembola, Diptera, Echinostomida, Hemiptera, Hymenoptera, Isoptera, Lepidoptera, Neuroptera, Orthoptera, Rhabditida, Siphonoptera, Thysanoptera. Genus-Species are indicated as follows: Actebia-fennica, Agrotis-ipsilon, A.-segetum, Anticarsia-gemmatalis, Argyrotaenia-citrana, Artogeia-rapae, Bombyx mori, Busseola-fusca, Cacyreus-marshall, Chilo-suppressalis, Christoneura-fumiferana, C.-occidentalis, C.-pinus pinus, C.-rosacena, Cnaphalocrocis-medinalis, Conopomorpha-cramerella, Ctenopsuestis-obliquana, Cydia-pomonella, Danaus-plexippus, Diabrotica undecimpunctata howardi, Diatraea-saccharallis, D.-grandiosella, Earias-vittella, Elasmolpalpus-lignoselius, Eldana-saccharina, Ephestia-kuehniella, Epinotia-aporema, Epiphyas-postvittana, Galleria-mellonella, Helicoverpa-zea, H.-punctigera, H.-armigera, Heliothis-virescens, Hyphantria-cunea, Lambdina-fiscellaria, Leguminivora-glycinivorella, Lobesia-botrana, Lymantria-dispar, Malacosoma-disstria, Mamestra-brassicae, M. configurata, Manduca-sexta, Marasmia-patnalis, Maruca-vitrata, Orgyia-leucostigma, Ostrinia-nubilalis, O.-furnacalis, Pandemis-pyrusana, Pectinophora-gossypiella, Perileucoptera-coffeella, Phthorimaea-opercullela, Pianotortrix-octo, Piatynota-stultana, Pieris-brassicae, Plodia-interpunctala, Plutella-xylostella, Pseudoplusia-includens, Rachiplusia-nu, Sciropophaga-incertulas, Sesamia-calamistis, Spilosoma-virginica, Spodoptera-exigua, S.-Jfrugiperda, S.-littoralis, S.-exempta, S.-litura, Tecia-solanivora, Thaumetopoea-pityocampa, Trichoplusia-ni, Wiseana-cervinata, Wiseana-copularis, Wiseana-jocosa, Blattaria-Blattella, Collembola-Xenylla, C.-Folsomia, Echinostomida-Fasciola, Hemiptera-Oncopeltrus, He.-Bemisia, He.-Macrosiphum, He.-Rhopalosiphum, He.-Myzus, Hymenoptera-Diprion, Hy.-Apis, Hy.-Macrocentrus, Hy.-Meteorus, Hy.-Nasonia, Hy.-Solenopsis, Isopoda-Porcellio, Isoptera-Reticulitermes, Orthoptera-Achta, Prostigmata-Tetranychus, Rhabitida-Acrobeloides, R.-Caenorhabditis, R.-Distolabrellus, R.-Panagrellus, R.-Pristionchus, R.-Pratylenchus, R.-Ancylostoma, R.-Nippostrongylus, R.-Panagrellus, R.-Haemonchus, R.-Meloidogyne, and Siphonaptera-Ctenocephalides. As used herein, insect pests and nematode pests are those species of insects and nematodes that are susceptible to the insecticidal and/or nematicidal transgenic protein compositions and polypeptides that encode them.

[0385] Select list of highly susceptible insects and nematodes. The list below contains both insects and nematodes. Nematodes are also susceptible to the compositions and treatments identified in the application and claims. The insects and nematodes below are considered especially suitable and susceptible to the compositions and treatments identified in the specification and claims.

[0386] Stalk borer—Busseola fusca, Southern Cornstalk Borer—Diatraea cramnbidoides, True armyworm—Pseudaletia unipuncta, Western bean cutworm—Striacosta albicosta, Black cutworm—Agrotis ipsilon, Corn earworm—Helicoverpa zea, European corn borer—Ostrinia nubilalis, Fall armyworm—Spodoptera frugiperda, Western corn rootworm—Diabrotica virgifera virgifera, Southern Corn Rootworm—Diabrotica undecimpunctata howardi, Northern Corn Rootworm—Diabrotica barberi, Western tarnished plant bug—Lygus Hesperus, Tarnished plant bug—Lygus lineolaris, Soybean cyst nematode—Heterodera glycines, Root-Knot Nematode—Meloidogyne hapla, Lesion nematode—Pratylenchus penetrans, Pink bollworm—Pectinophora gossypiella, Cotton bollworm—Helicoverpa armigera, Corn earworm—Helicoverpa zea, Sugarcane stalk borer—Diatraea saccharalis, Asian corn borer—Ostrinia furnacalis, Native budworm—Helicoverpa punctigera, Tobacco budworm—Heliothis virescens, Beet armyworm—Spodoptera exigua, Soybean Looper—Chrysodeixis includens, Velvetbean caterpillar—Anticarcia gemmatalis, Soybean looper—Pseudoplusia includes, Soybean anxil borer—Epinotia aporema, and Sunflower looper—Rachiplusia nu.

### EXAMPLES

### Example 1. Identification and Isolation of Binary and Tertiary Cleavable Linking Peptides

[0387] 1.) The FRET Research and Discovery of Cleavable Linking Peptides

[0388] To find a Linker with insect and/or nematode protease and human gastrointestinal cleavable properties, the inventors used a peptide library coupled to FRET molecules (a dye and a quencher) for the identification of peptides that cleave in either insect gut environment or in simulated human gastrointestinal environment as reporter assays. As shown in FIG. 1, a FRET kit contains pools of FRET molecules with a stretch of 3 variable amino acid sequences (grid pattern circle) bracketed by a series of glycine amino acids (horizontal line pattern) attached to either a dye (solid black circle with a protruding square) or a quencher (solid black circle with a square-shaped indent). FIG. 1 illustrates that each FRET molecule gives no signal if the variable region is not cleaved but can be excited if it is cleaved. The speed at which the cleavage occurs (i.e. the specificity of the sequence for the proteases) can be ranked by the rate at which the fluorescent signal occurs over time, i.e., its slope.

[0389] The FRET kit used (Cat. No. PSREPLI005, Mimotopes, Victoria, Australia) contains 512 pools of up to 8 different FRET molecules per pool. The FRET reaction is very high-throughput, with the enzymes added to the plate of pooled material with a multichannel loading pipet and then the plate is read once a minute for detectable fluorescence. The output of fluorescence detection is recorded for each reaction.

[0390] FRET samples were prepared immediately prior to assay as recommended by the manufacturer (add 5 μL 50% acetonitrile in water to each well and agitate plate on shaker for 5 minutes. Then add 45 μL of assay buffer and agitate again for 5 minutes). At this point, the FRET pools were ready of the addition of 50 μL of the working enzyme stock to start the reactions. Using a multichannel, repeat pipetter, 50 μL of the working enzyme stock (for each of the enzyme types tested) was added to each well and then the plate was immediately placed into a plate reader (SpectraMax plate reader with SoftMax Pro 6.0 software, Molecular Devices, Sunnyvale Calif.) and emissions were read using the setting of Excitation 320 nm, Emission 420 nm, with a cut-off of 420 nm. Readings occurred every 1 minute for 15 minutes. Once the plates were completed, they were sealed with an aluminum sealer and stored at −80° C.

[0391] To test the FRET pool cleavage by pepsin or simulated human gastric fluid (SGF), the assay buffer was 35 mM NaCl, pH 1.2. The commercially sourced enzyme (Sigma P6887) enzyme was prepared by dissolving 1 mg/ml pepsin in the assay buffer. Pepsin stock was then diluted 1:200 by adding 250 μL of stock enzyme to 50 mL of assay buffer. This working solution was then used for all plate screenings.

[0392] To test the FRET pool cleavage by gut or intestinal enzymes of a coleopteran pest, gut enzymes (CELOP) were isolated from Southern Corn Rootworm (Diabrotica undecimpunctata). Southern Corn Rootworm were commercially obtained from Crop Characteristics (Farmington, MN) as 3rd instar larvae. Insects were anesthetized by placing them on a cold pack for several minutes before the dissection began. To isolate the gut, the posterior end was pinned to a dissection plate and another pin was used to nick the soft tissue behind the head. The pin was inserted behind the head capsule and then pulled away from pinned insect, pulling the digestive tract out of the body with the head. The gut could then be collected. About 20 guts were added to a pre-weighed tube with 100 μL solution of 100 mM PBS pH 5.7 and weighed after to determine the mass of guts added. Gut contents were extracted by vortexing the solution for 1-2 minutes. Tubes were then spun at 15,000 rpm for 1 minute. The liquid layer was then transferred to a 0.2 μm mico-spin filter and spun at 15,000 rcf for 1 minute. The filter was washed with 400 μL of 100 mM PBS buffer pH 5.7 and the permeate from both spins were combined. The sterile filtered gut contents were then diluted to 10 mg/mL in buffer and stored at −20 C. To make a working stock, the gut contents where then diluted 10× by mixing 700 μL stock to 7 mL with assay buffer for each plate. Using a multichannel, repeat pipetter, 50 μL of 1× gut extract was added to each well and read immediately as described above.

[0393] To test the FRET pool cleavage by gut enzymes of a lepidopteran pest (LEP), gut enzymes were isolated from Corn Earworm (Helicoverpa zea). Corn Earworm insects were obtained commercially from Benzon Research (Carlisle, Pa.) as eggs. Hatched larvae were raised on artificial diet until ⅘^{th} instar (20 mm long) before guts were isolated. Before gut extract, larvae were anesthetized using CO₂. The larva was then pinned on the dissection plate at both the head and the tail. Using dissection scissors, the cuticle was nicked. The dissection scissors were then inserted into the nick and the cuticle was lengthwise along the insect. The cuticle was then carefully pulled back and pinned open to reveal the digestive track. Using DI water, the insect was thoroughly rinsed to remove hemolymph. The gut was then excised with tweezers and placed in a solution of 500 μL of 200 mM Tris-HCl pH 8.1 150 mM NaCl (assay buffer). The tube was pre-weighed and post-weighed to calculate the total amount of gut added. CEW gut was diluted to a stock concentration of 7 mg/ml (10×) in 200 mM Tris-HCl pH 8.1 150 mM NaCl. This was diluted fresh each plate by 20× with the assay buffer. Using a multichannel, repeat pipetter, 50 μL of 1× gut extract was added to each well and read immediately as described above.

[0394] 1.1) Protease Cleavage Analysis of FRET Peptide Pools

[0395] The FRET kits (Cat. No. PSREPLI005, Mimotopes, Victoria, Australia) were tested against LEP, COLEOP and SGF gut simulated protease environments and data was recovered. There were two types of data (slope of cleavage over time (which is presented as either a raw slope, or as an indexed value where the steepest slope is 100% and each slope is represented as a percentage of the highest slope) and cleaved components) were generated. The first type of data was the slope of fluorescence detection over 10 minutes. The slope of the reaction allowed the ranking of the two or three amino acid sequences for their speed to cleave in the various protease environments. Table 4 shows the top 50 sequences that cleaved for each of the digestive conditions (SGF represents human gastrointestinal environment; COLEOP is the gut environment of Coleoptera insects; and LEP is the gut environment of Lepidopteran insects). Shown in Table 5 are sample sequences that did not cleave in the digestive conditions, and represent an example of sequences outside of the Markush that are not cleavable in the X and Y conditions.

TABLE 4
Representative cleavable sequences from pooled FRET screening
for each of the digestive conditions; SGF, COLEOP, and LEP

| Y | | X | | | |
|---|---|---|---|---|---|
| SGF | | COLEOP | | LEP | |
| | % of Max | | % of Max | | % of Max |
| Sequence | Slope | Sequence | Slope | Sequence | Slope |
| IFF | 100 | IKN | 100 | PKK | 100 |
| IFY | 100 | IKQ | 100 | PKR | 100 |
| IYF | 100 | IRN | 100 | PRK | 100 |
| LFF | 100 | IRQ | 100 | PRR | 100 |
| LFY | 100 | LKN | 100 | VRY | 93 |
| LYF | 100 | LKQ | 100 | AKF | 93 |
| LYY | 100 | LRN | 100 | AKY | 93 |
| FFA | 84 | LRQ | 100 | ARF | 93 |
| FFV | 84 | KIK | 83 | ARY | 93 |
| FYA | 84 | KIR | 83 | VKF | 93 |
| FYV | 84 | KLK | 83 | VKY | 93 |
| YFA | 84 | KLR | 83 | VRF | 93 |
| YFV | 84 | RIK | 83 | RRT | 93 |
| FFI | 78 | RIR | 83 | KKS | 93 |
| FFL | 78 | RLK | 83 | KKT | 93 |
| FYI | 78 | RLR | 83 | KRS | 93 |
| FYL | 78 | NIK | 74 | KRT | 93 |
| YFI | 78 | NIR | 74 | RKS | 93 |
| YFL | 78 | NLK | 74 | RKT | 93 |
| YYL | 78 | NLR | 74 | RRS | 93 |
| AIF | 78 | QIK | 74 | RRY | 92 |
| ALF | 78 | QIR | 74 | KKF | 92 |
| ALY | 78 | QLK | 74 | KKY | 92 |
| VIF | 78 | QLR | 74 | KRF | 92 |
| VLF | 78 | AIK | 70 | KRY | 92 |
| VLY | 78 | AIR | 70 | RKF | 92 |
| DFF | 66 | ALK | 70 | RKY | 92 |
| DFY | 66 | ALR | 70 | RRF | 92 |
| DYF | 66 | VIK | 70 | RTR | 90 |
| EFF | 66 | VIR | 70 | KSK | 90 |
| EFY | 66 | VLK | 70 | KSR | 90 |
| EYF | 66 | VLR | 70 | KTK | 90 |
| IFA | 65 | IKS | 68 | KTR | 90 |
| IFV | 65 | IKT | 68 | RSK | 90 |
| LFA | 65 | IRS | 68 | RSR | 90 |
| LFV | 65 | IRT | 68 | RTK | 90 |
| LYA | 65 | LKS | 68 | VRT | 90 |
| LYV | 65 | LKT | 68 | AKS | 90 |
| AFF | 63 | LRS | 68 | AKT | 90 |
| AFY | 63 | LRT | 68 | ARS | 90 |
| AYF | 63 | INK | 56 | ART | 90 |
| VFF | 63 | INR | 56 | VKS | 90 |
| VFY | 63 | IQK | 56 | VKT | 90 |
| VYF | 63 | IQR | 56 | VRS | 90 |
| IIF | 63 | LNK | 56 | LTR | 89 |
| ILF | 63 | LNR | 56 | ISK | 89 |
| ILY | 63 | LQK | 56 | ISR | 89 |
| LIF | 63 | LQR | 56 | ITK | 89 |
| LIY | 63 | IKA | 56 | ITR | 89 |
| LLF | 63 | IKV | 56 | LSK | 89 |

TABLE 5
Example of 5 failed cleavable sequences from pooled FRET screening
for each of the digestive conditions; SGF, COLEOP, and LEP

| Y | | X | | | |
|---|---|---|---|---|---|
| SGF | | COLEOP | | LEP | |
| | % of Max | | % of Max | | % of Max |
| Sequence | Slope | Sequence | Slope | Sequence | Slope |
| IFF | 0 | IKN | 0 | PKK | 0 |
| IFY | 0 | IKQ | 0 | PKR | 0 |
| IYF | 0 | IRN | 0 | PRK | 0 |
| LFF | −1 | IRQ | 0 | PRR | 0 |
| LFY | −1 | LKN | −2 | VRY | 0 |

[0396] The amino acids represented in the top 5% of wells from each digestive condition were used to create the Markush group that constitutes a binary peptide that comprises of an amino acid sequence selected from the group consisting of: X₁-X₂-Y₁-Y₂, X₁-X₂-X₃-Y₁-Y₂, X₁-X₂-X₃-X₄-Y₁-Y₂, X₁-X₂-Y₁-Y₂-Y₃, X₁-X₂-X₃-Y₁-Y₂-Y₃, X₁-X₂-X₃-X₄-Y₁-Y₂-Y₃, X₁-X₂-Y₁-Y₂-Y₃-Y₄, X₁-X₂-X₃-Y₁-Y₂-Y₃-Y₄, X₁-X₂-X₃-X₄-Y₁-Y₂-Y₃-Y₄, Y₁-Y₂-X₁-X₂, Y₁-Y₂-X₁-X₂-X₃, Y₁-Y₂-X₁-X₂-X₃-X₄, Y₁-Y₂-Y₃-X₁-X₂, Y₁-Y₂-Y₃-X₁-X₂-X₃, Y₁-Y₂-Y₃-X₁-X₂-X₃-X₄, Y₁-Y₂-Y₃-Y₄-X₁-X₂, Y₁-Y₂-Y₃-Y₄-X₁-X₂-X₃, and Y₁-Y₂-Y₃-Y₄-X₁-X₂-X₃-X₄, wherein each Xn and each Yn is an amino acid, and wherein X₁ is selected from the group consisting of: (all single letter amino acid format) A, D, E, G, I, K, L, N, P, Q, R, and V; X₂ is selected from the group consisting of A, F, G, I, K, L, N, P, Q, R, S, T, V, and Y; X₃ is selected from the group consisting of A, D, E, F, G, I, K, L, N, Q, R, S, T, V, and Y; X₄ is selected from the group consisting of: R, H, K, D, E, S, T, N, Q, G, A, I, L, M, F, W, Y, and V. In some embodiments, Y₁ is selected from the group consisting of: (all single letter amino acid format) A, D, E, F, G, I, L, N, Q, S, T, V, and Y; Y₂ is selected from the group consisting of F, G, I, L, and Y; and Y₃ is selected from the group consisting of A, D, E, F, G, I, K, L, R, S, T, V, and Y; and Y₄ is selected from the group consisting of: R, H, K, D, E, S, T, N, Q, G, A, I, L, M, F, W, Y, and V.

[0397] One embodiment of the sequences discovered from SGF (simulated human gut environment) screening, in the XY or YX format, the human gut protease cleavable substrate may include one or more of the following peptides: AFF, AFG, AFI, AFL, AFV, AFY, AGF, AGL, AIF, AIL, ALF, ALG, ALI, ALL, ALY, AYF, AYL, DFF, DFG, DFI, DFL, DFY, DGF, DGL, DIF, DLF, DLG, DLY, DYF, DYL, EFF, EFG, EFI, EFL, EFY, EGF, EGL, EIF, ELF, ELG, ELY, EYF, EYL, FF, FFA, FFD, FFE, FFF, FFG, FFI, FFK, FFL, FFR, FFS, FFT, FFV, FFY, FGA, FGD, FGE, FGF, FGI, FGK, FGL, FGR, FGS, FGT, FGV, FGY, FLV, FLR, FYA, FYD, FYE, FYF, FYG, FYI, FYK, FYL, FYR, FYS, FYT, FYV, FYY, GFA, GFD, GFE, GFF, GFI, GFK, GFL, GFR, GFS, GFT, GFV, GFY, GGL, GIF, GIL, GLF, GLI, GLL, GLY, GYF, GYL, IF, IFA, IFF, IFG, IFI, IFL, IFV, IFY, IGF, IGL, IIF, IIL, ILF, ILG, ILI, ILL, ILY, IYF, IYL, LFA, LFF, LFG, LFI, LFL, LFV, LFY, LG, LGA, LGE, LGF, LGI, LGL, LGV, LGY, LIF, LIG, LII, LIL, LIY, LLF, LLG, LLI, LLL, LLY, LYA, LYF, LYG, LYI, LYL, LYV, LYY, NFF, NFG, NFI, NFL, NFY, NGF, NGL, NIL, NLG, NLI, NLL, NYF, NYL, QFF, QFG, QFI, QFL, QFY, QGF, QGL, QIL, QLG, QLI, QLL, QYF, QYL, SFF, SFG, SFI, SFL, SFY, SGF, SGL, SIF, SIL, SLF, SLG, SLI, SLL, SLY, SYF, SYL, TFF, TFG, TFI, TFL, TFY, TGF, TGL, TIF, TIL, TLF, TLG, TLI, TLL, TLY, TYF, TYL, VFF, VFG, VFI, VFL, VFY, VGF, VGL, VIF, VIL, VLF, VLG, VLI, VLL, VLY, VYF, VYL, YFA, YFD, YFE, YFF, YFG, YFI, YFK, YFL, YFR, YFS, YFT, YFV, YFY, YGF, YGL, YYF, YYL.

[0398] Another embodiment of the sequences discovered from SGF screening, Y SGF cleavable peptides may include one or more of: AFF, AFI, AFL, AFY, AIF, AIL, ALF, ALI, ALL, ALY, AYF, AYL, DFF, DFI, DFL, DFY, DIF, DLF, DLY, DYF, DYL, YFL, EFF, EFI, EFL, 0, EFY, EIF, ELF, ELY, EYF, EYL, FFA, FFD, FFE, FFF, FFI, FFK, FFL, FFR, FFS, FFT, FFV, FFY, FYA, FYD, FYE, FYF, FYI, FYK, FYL, FYR, FYS, FYT, FYV, FYY, IFA, IFF, IFI, IFL, IFV, IFY, IIF, IIL, ILF, ILI, ILL, ILY, IYF, IYL, LFA, LFF, LFI, LFL, LFV, LFY, LIF, LII, LIL, LIY, LLF, LLI, LLL, LLY, LYA, LYF, LYI, LYL, LYV, LYY, NFF, NFI, NFL, NFY, NIL, NLI, NLL, NYF, NYL, QFF, QFI, QFL, QFY, QIL, QLI, QLL, QYF, QYL, SFF, SFI, SFL, SFY, SIF, SIL, SLF, SLI, SLL, SLY, SYF, SYL, TFF, TFI, TFL, TFY, TIF, TIL, TLF, TLI, TLL, TLY, TYF, TYL, VFF, VFI, VFL, VFY, VIF, VIL, VLF, VLI, VLL, VLY, VYF, VYL, YFA, YFD, YFE, YFF, YFI, YFK, YFL, YFR, YFS, YFT, YFV, YFY, YYF, YYL.

[0399] In some embodiments, exemplary sequences discovered from insect cleavability, the X region may include one or more insect and/or nematode gut protease cleavable peptide sequences: AAG, AAK, AAR, AFG, AFK, AFR, AGF, AGI, AGK, AGL, AGN, AGQ, AGR, AGS, AGT, AGY, AIG, AIK, AIN, AIQ, AIR, AKF, AKG, AKI, AKK, AKL, AKN, AKQ, AKR, AKS, AKT, AKY, ALG, ALK, ALN, ALQ, ALR, APF, APG, APK, APR, ARF, ARG, ARI, ARK, ARL, ARN, ARQ, ARR, ARS, ART, ARY, ASG, ASK, ASR, ATG, ATK, ATR, AVG, AVK, AVR, AYG, AYK, AYR, DGK, DGR, DIG, DIK, DIR, DLG, DLK, DLR, EGK, EGR, EIG, EIK, EIR, ELG, ELK, ELR, ER, FVR, GAF, GAI, GAK, GAL, GAR, GAY, GFK, GFR, GIK, GIN, GIQ, GIR, GKA, GKD, GKE, GKF, GKI, GKK, GKL, GKN, GKQ, GKR, GKS, GKT, GKV, GKY, GLK, GLN, GLQ, GLR, GNA, GNK, GNR, GNV, GPK, GPR, GQA, GQK, GQR, GQV, GRA, GRD, GRE, GRF, GRI, GRK, GRL, GRN, GRQ, GRR, GRS, GRT, GRV, GRY, GSI, GSK, GSL, GSR, GTI, GTK, GTL, GTR, GVF, GVI, GVK, GVL, GVR, GVY, GYK, GYR, IGA, IGF, IGI, IGK, IGL, IGN, IGQ, IGR, IGS, IGT, IGV, IGY, IIG, IIK, IIR, IKA, IKF, IKG, IKI, IKK, IKL, IKN, IKQ, IKR, IKS, IKT, IKV, IKY, ILG, ILK, ILR, INA, ING, INK, INR, INV, IPG, IPK, IPR, IQA, IQG, IQK, IQR, IQV, IRA, IRF, IRG, IRI, IRK, IRL, IRN, IRQ, IRR, IRS, IRT, IRV, IRY, ISG, ISK, ISR, ITG, ITK, ITR, KAF, KAG, KAI, KAK, KAL, KAR, KAY, KFF, KFG, KFK, KFR, KGA, KGD, KGE, KGF, KGI, KGK, KGL, KGN, KGQ, KGR, KGS, KGT, KGV, KGY, KIG, KIK, KIN, KIQ, KIR, KKA, KKD, KKE, KKF, KKG, KKN, KKQ, KKS, KKT, KKV, KKY, KLG, KLK, KLN, KLQ, KLR, KNG, KNK, KNR, KPG, KPK, KPR, KQG, KQK, KQR, KRA, KRD, KRE, KRF, KRG, KRN, KRQ, KRS, KRT, KRV, KRY, KSG, KSI, KSK, KSL, KSR, KTG, KTI, KTK, KTL, KTR, KVF, KVG, KVI, KVK, KVL, KVR, KVY, KYG, KYK, KYR, LFR, LGA, LGF, LGI, LGK, LGL, LGN, LGQ, LGR, LGS, LGT, LGV, LGY, LIG, LIK, LIR, LK, LKA, LKF, LKG, LKI, LKK, LKL, LKN, LKQ, LKR, LKS, LKT, LKV, LKY, LLG, LLK, LLR, LNA, LNG, LNK, LNR, LNV, LPG, LPK, LPR, LQA, LQG, LQK, LQR, LQV, LRA, LRF, LRG, LRI, LRK, LRL, LRN, LRQ, LRR, LRS, LRT, LRV, LRY, LSG, LSK, LSR, LTG, LTK, LTR, NGK, NGR, NIG, NIK, NIR, NLG, NLK, NLR, PGK, PGR, PIG, PIK, PIR, PKG, PKK, PKR, PLG, PLK, PLR, PRG, PRK, PRR, QGK, QGR, QIG, QIK, QIR, QLG, QLK, QLR, RAF, RAG, RAI, RAK, RAL, RAR, RAY, RFF, RFG, RFK, RFR, RGA, RGD, RGE, RGF, RGI, RGK, RGL, RGN, RGQ, RGR, RGS, RGT, RGV, RGY, RIG, RIK, RIN, RIQ, RIR, RKA, RKD, RKE, RKF, RKG, RKK, RKN, RKQ, RKS, RKT, RKV, RKY, RLF, RLFL, RLG, RLK, RLN, RLQ, RLR, RNG, RNK, RNR, RPG, RPK, RPR, RQG, RQK, RQR, RRA, RRD, RRE, RRF, RRG, RRK, RRN, RRQ, RRR, RRS, RRT, RRV, RRY, RSG, RSI, RSK, RSL, RSR, RTG, RTI, RTK, RTL, RTR, RVF, RVG, RVI, RVK, RVL, RVR, RVY, RYG, RYK, RYR, VAG, VAK, VAR, VFG, VFK, VFR, VGF, VGI, VGK, VGL, VGN, VGQ, VGR, VGS, VGT, VGY, VIG, VIK, VIN, VIQ, VIR, VKF, VKG, VKI, VKK, VKL, VKN, VKQ, VKR, VKS, VKT, VKY, VLG, VLK, VLN, VLQ, VLR, VPG, VPK, VPR, VR, VRF, VRG, VRI, VRK, VRL, VRN, VRQ, VRR, VRS, VRT, VRY, VSG, VSK, VSR, VTG, VTK, VTR, VVG, VVK, VVR, VYG, VYK, VYR.

[0400] In another embodiment of the sequences discovered from insect cleavability, the X region may include one or more insect and/or nematode gut protease cleavable peptide sequences: AAK, AAR, AFK, AFR, AIK, AIN, AIQ, AIR, AKF, AKI, AKK, AKL, AKN, AKQ, AKR, AKS, AKT, AKY, ALK, ALN, ALQ, ALR, APK, APR, ARF, ARI, ARK, ARL, ARN, ARQ, ARR, ARS, ART, ARY, ASK, ASR, ATK, ATR, AVK, AVR, AYK, AYR, DIK, DIR, DLK, DLR, EIK, EIR, ELK, ELR, IIK, IIR, IKA, IKF, IKI, IKK, IKL, IKN, IKQ, IKR, IKS, IKT, IKV, IKY, ILK, ILR, INA, INK, INR, INV, IPK, IPR, IQA, IQK, IQR, IQV, IRA, IRF, IRI, IRK, IRL, IRN, IRQ, IRR, IRS, IRT, IRV, IRY, ISK, ISR, ITK, ITR, KAF, KAI, KAK, KAL, KAR, KAY, KFK, KFR, KIK, KIN, KIQ, KIR, KKA, KKD, KKE, KKF, KKN, KKQ, KKS, KKT, KKV, KKY, KLK, KLN, KLQ, KLR, KNK, KNR, KPK, KPR, KQK, KQR, KRA, KRD, KRE, KRF, KRN, KRQ, KRS, KRT, KRV, KRY, KSI, KSK, KSL, KSR, KTI, KTK, KTL, KTR, KVF, KVI, KVK, KVL, KVR, KVY, KYK, KYR, LIK, LIR, LKA, LKF, LKI, LKK, LKL, LKN, LKQ, LKR, LKS, LKT, LKV, LKY, LLK, LLR, LNA, LNK, LNR, LNV, LPK, LPR, LQA, LQK, LQR, LQV, LRA, LRF, LRI, LRK, LRL, LRN, LRQ, LRR, LRS, LRT, LRV, LRY, LSK, LSR, LTK, LTR, NIK, NIR, NLK, NLR, PIK, PIR, PKK, PKR, PLK, PLR, PRK, PRR, QIK, QIR, QLK, QLR, RAF, RAI, RAK, RAL, RAR, RAY, RFK, RFR, RIK, RIN, RIQ, RIR, RKA, RKD, RKE, RKF, RKN, RKQ, RKS, RKT, RKV, RKY, RLK, RLN, RLQ, RLR, RNK, RNR, RPK, RPR, RQK, RQR, RRA, RRD, RRE, RRF, RRN, RRQ, RRS, RRT, RRV, RRY, RSI, RSK, RSL, RSR, RTI, RTK, RTL, RTR, RVF, RVI, RVK, RVL, RVR, RVY, RYK, RYR, VAK, VAR, VFK, VFR, VIK, VIN, VIQ, VIR, VKF, VKI, VKK, VKL, VKN, VKQ, VKR, VKS, VKT, VKY, VLK, VLN, VLQ, VLR, VPK, VPR, VRF, VRI, VRK, VRL, VRN, VRQ, VRR, VRS, VRT, VRY, VSK, VSR, VTK, VTR, VVK, VVR, VYK, VYR.

[0401] The lack of numerous common sequences that meet the both high ranked X and Y cleavability conditions led to the merging of the sequences discovered in the X and Y categories to build binary and tertiary peptides. This research was called Round 2 and involved combinations from the Round 1 data, above. One way this was tested involved several combinations of insect cleavable and SGF cleavable sequences (X and Y regions respecdesigned and ordered to be synthesized as FRET molecules. Another way this was tested involved the combinations of insect cleavable and SGF cleavable sequences designed and ordered to be synthesized as DNA encoding the ERSP-STA-(TP-L)ₙ protein for transient plant expression. Both FRET and transient expressed proteins were used to exemplify the insect cleavable and SGF cleavable nature of the binary and tertiary peptides.

[0402] Round 2 data from FRET molecules that represented a subset of binary combinations based on the observed top hits in Round 1 provided a hierarchical ranking of the various binary combinations. Round 2 FRET molecules were synthesized, resuspended, and tested in cleavage enzyme assays as described above in Round 1. Many combinations of binary cleavable linking peptides were tested against LEP, COLEOP and SGF conditions.

[0403] Transiently expressed protein from DNA encoding variation of these the ERSP-STA-(TP-L)ₙ protein where L is binary and tertiary peptide based on Round 2 data, and was also treated with the same cleavage enzymes (LEP, COLEOP and SGF).

[0404] Data that embodies Round 2 FRET experiment is listed below in section 1.1. Data that embodies Round 2 plant expression system in listed in section 1.2. The amino acid sequences listed in SEQ ID NOs: 1594-1758 were synthesized as either/or FRET and transient plant expression.

(SEQ ID NO: 1649)
AFVRLFGS,
(SEQ ID NO: 1650)
AKLFVGS,
(SEQ ID NO: 1651)
ALFALKGS,
(SEQ ID NO: 1652)
ALFLKGS,
(SEQ ID NO: 1653)
ALFLRGS,
(SEQ ID NO: 1654)
ALFRGS,
(SEQ ID NO: 1655)
ALFRLRGS,
(SEQ ID NO: 1656)
ALKALFGS,
(SEQ ID NO: 1657)
ALKFFGS,
(SEQ ID NO: 1658)
ALKFLVGS,
(SEQ ID NO: 1659)
ALKIFVGS,
(SEQ ID NO: 1660)
ALKLFVGS,
(SEQ ID NO: 1661)
FFADIKGS,
(SEQ ID NO: 1662)
FFALKGS,
(SEQ ID NO: 1663)
FFLKGS,
(SEQ ID NO: 1664)
FFLRGS,
(SEQ ID NO: 1665)
FFRLRGS,
(SEQ ID NO: 1666)
FGYRIKGS,
(SEQ ID NO: 1667)
FLRLFGS,
(SEQ ID NO: 1668)
FYARRGS,
(SEQ ID NO: 1669)
GGLRKKGS,
(SEQ ID NO: 1670)
IFVALKGS,
(SEQ ID NO: 1671)
IFVLKGS,
(SEQ ID NO: 1672)
IFVLRGS,
(SEQ ID NO: 1673)
IFVRGS,
(SEQ ID NO: 1674)
IFVRLRGS,
(SEQ ID NO: 1675)
ILFNIKGS,
(SEQ ID NO: 1676)
LFAAPFGS,
(SEQ ID NO: 1677)
LFVALKGS,
(SEQ ID NO: 1678)
LFVLKGS,
(SEQ ID NO: 1679)
LFVLRGS,
(SEQ ID NO: 1680)
LFVRGS,
(SEQ ID NO: 1681)
LFVRLRGS,
(SEQ ID NO: 1682)
LFVRVFLGS,
(SEQ ID NO: 1683)
LGERGS,
(SEQ ID NO: 1684)
LKALFGS,
(SEQ ID NO: 1685)
LKFFGS,
(SEQ ID NO: 1686)
LKIFVGS,
(SEQ ID NO: 1687)
LKLFVGS,
(SEQ ID NO: 1688)
LRALFGS,
(SEQ ID NO: 1689)
LRFFGS,
(SEQ ID NO: 1690)
LRIFVGS,
(SEQ ID NO: 1691)
LRLFVGS,
(SEQ ID NO: 1692)
RALFGS,
(SEQ ID NO: 1693)
RIFVGS,
(SEQ ID NO: 1694)
RLFVGS,
(SEQ ID NO: 1695)
RLRALFGS,
(SEQ ID NO: 1696)
RLRFFGS,
(SEQ ID NO: 1697)
RLRIFVGS,
(SEQ ID NO: 1698)
RLRLFVGS,
(SEQ ID NO: 1699)
RRKAFVGS,
(SEQ ID NO: 1700)
RRKLIFGS,
(SEQ ID NO: 1701)
RRRFFAGS,
(SEQ ID NO: 1702)
VFGRKGGS,
(SEQ ID NO: 1703)
YFVRKGS.

[0405] Data from the Round 2 FRET that exemplifies the combination of both X and Y cleavability in a binary or tertiary peptide are presented in Table 6.

TABLE 6
Representative sequences for X-Y
combinations showing cleavability in
both X and Y cleavage conditions

| | % of Max | |
|---|---|---|
| | Slope | |
| Sequence | X | Y |
| IFVALKGS (SEQ ID NO: 1670) | 69 | 88 |
| ALKLFVGS (SEQ ID NO: 1660) | 100 | 88 |
| LFVALKGS (SEQ ID NO: 1677) | 92 | 76 |
| LRLFVGS (SEQ ID NO: 1691) | 74 | 75 |
| LFVRLRGS (SEQ ID NO: 1681) | 94 | 74 |
| LKLFVGS (SEQ ID NO: 1687) | 98 | 67 |

### Example 3. Plant Protein Expression Testing of the Candidate Binary/Tertiary Cleavable Linking Peptides

[0406] The cloning and expression of a proteins containing multiple copies of TP intervened by binary or tertiary cleavable linking peptides was performed using a tobacco transient expression system technology referred to as FECT (Liu Z & Kearney CM, BMC Biotechnology, 2010, 10:88, the disclosure of which is incorporated herein by reference in its entirety). The FECT vector contains a T-DNA region for agroinfection, which contains a CaMV 35S promoter that drives the expression of the foxtail mosaic virus RNA without the genes encoding the viral coating protein and the triple gene block. In the place of the coating protein and triple block are a pair of subcloning sites (PacI and AvrII) that allow an ORF to be subcloned N′ to C′ following the PacI site for high levels of transient viral expression. This “disarmed” virus genome prevents plant to plant transmission. In addition to the FECT vector subcloned to express the various proteins with TP intervened by binary or tertiary cleavable linking peptides, a second FECT vector is co-expressed that encodes P19, a RNA silencing suppressor protein from tomato bushy stunt virus, to prevent the post-transcriptional gene silencing (PTGS) of the introduced T-DNA. Agrobacterium containing the transient plant expression system are injected into the leaves of tobacco (Nicotiana benthamiana) as described below.

[0407] With reference to FIGS. 2-5, various designs of the insecticidal and/or nematicidal proteins and DNA construct encoding insecticidal and/or nematicidal proteins are illustrated. In some examples, a TP repeat with intervening binary or tertiary cleavable linking peptides is shown. An illustrative ERSP motif which can be used in accordance with the exemplary embodiments provided here is the Barley Alpha-Amylase Signal peptide (BAAS), which is comprised of 24 Amino acids as shown below (N′ to C′, one letter code):

(SEQ ID NO: 4)
MANKHLSLSLFLVLLGLSASLASG.

[0408] The Zea mays ubiquitin monomer used in some of the proteins was comprised of 75 Amino acids as shown below (N′ to C′, one letter code):

QIFVKTLTGKTITLEVESSDTIDNVKAKIQDKEGIPPDQQRLIFAGKQLE
DGRTLADYNIQKESTLHLVLRLRGG (Accession Number XP_
020404049.1, SEQ ID NO: 1759).

[0409] An exemplary TP useful in the example described here can include: U-ACTX-Hv1a, which has the following amino acid sequence (N′ to C′, one letter code):

(SEQ ID NO: 6)
QYCVPVDQPCSLNTQPCCDDATCTQERNENGHTVYYCRA

or U+2-ACTX-Hv1a, which has the following amino acid sequence (N′ to C′, one letter code):

(SEQ ID NO: 5)
GSQYCVPVDQPCSLNTQPCCDDATCTQERNENGHTVYYCRA.

[0410] In separate examples, three different intervening binary or tertiary cleavable linking peptides (denoted by the short hand form L1-L4) were used (N′ to C′, one letter code):

(L1)
(SEQ ID NO: 1)
IGER
(L2)
(SEQ ID NO: 1660)
ALKLFVGS
(L3)
(SEQ ID NO: 1674)
IFVRLRGS
(L4)
(SEQ ID NO: 1658)
ALKFLVGS.

[0411] In addition, a histidine tag, which has the following amino acid sequence (N′ to C′, one letter code): HHHHHHHHHH (SEQ ID NO: 1760) is used as part of the constructed insecticidal and/or nematicidal protein. The following insecticidal and/or nematicidal proteins: BAAS:UBI:U+2-ACTX-Hv1a:(L:U-ACTX-Hv1a)₃:His10 and BAAS: (U-ACTX-Hv1a:L)₃:U-ACTX-Hv1a:H10 ORF DNAs (where BAAS is the ERSP; and L is a binary or tertiary cleavable linking peptide) as schematically shown in FIGS. 6A and 6B, were cloned into the Pac I and Avr II restriction sites of the FECT expression vector to create the transient vectors which were then transformed into Agrobacterium tumefaciens strain, GV3101 cells using a freeze-thaw method as follows: the stored competent GV3101 cells were thawed on ice and then mixed with 1-5 μg pure transient vectors DNA. The cell-DNA mixture was then kept on ice for 5 minutes, then transferred to −80° C. for 5 minutes, and then incubated in a 37° C. water bath for 5 minutes. The freeze-thaw treated cells were then diluted into 1 mL LB medium and shaken on a rocking table for 2-4 hours at room temperature. Cell-LB mixture was then spun down at 5,000 rcf for 2 minutes to pellet cells and then 800 μL of LB supernatant is removed. The cells are then resuspended in the remaining liquid and the entire volume, approximately 200 μL, of the transformed cell-LB mixture was then spread onto LB agar plates with the appropriate antibiotics (10 μg/mL rifampicin, 25 μg/mL gentamycin, and 50 μg/mL kanamycin) and incubated at 28° C. for two days. Resulting transformed colonies were then picked and culture in 6 mL aliquots of LB medium with the appropriate antibiotics for transformed DNA analysis and making glycerol stocks of the transformed GV3 101 cells.

[0412] The transformed GV3101 cells were streaked onto an LB plate with the appropriate antibiotics (as described above) from their glycerol stock and incubated at 28° C. for two days. A colony of transformed GV3 101 cells was used to inoculate 5 mL of LB-MESA medium (LB media supplemented with 10 mM MES, 20 μM acetosyringone) and the same antibiotics described above, and grown overnight at 28° C. The cells of the overnight culture were collected by centrifugation at 5000 rpm for 10 minutes and resuspended in the induction medium (10 mM MES, 10 mM MgCl2, 100 μM acetosyringone) at a final OD600 of 1.0. The cells were then incubated in the induction medium for 2 hours to overnight at room temperature and were then ready for transient transformation of tobacco leaves. Because FECT uses a mixture of P19 expression and the gene of interest expression, cultures of cells for the pFECT-P19 transformed GV3 101 cells and the gene of interest cultures were mixed together in equal amounts for infiltration of tobacco leaves before injection into the plant leaves. The treated cells were infiltrated into the underside of attached leaves of Nicotiana benthamiana plants by injection, using a 3 mL syringe without a needle attached. Protein expression in tobacco leaves was evaluated at 6-8 days post-infiltration.

[0413] Full length gene-of-interest proteins were purified from the tobacco by using a syringe vacuum extraction technique. The leaf tissue was rolled up and placed inside the barrel of a 60 mL syringe with the needle port capped along with 10 mL of buffer (35 mM NaCl, 5 mM EDTA, 1 Roche cOmplete Tab protease inhibitor tab, pH 1.2 using HCl). The plunger was then inserted into the barrel, inverted so the needle port was up, the cap was removed and excess air was removed by forcing the plunger in. Once the majority of the air had been removed, the syringe was capped and the plunger was pulled back as far as possible, creating a vacuum, and held for 30 seconds. The vacuum was then slowly released by allowing the plunger to go back to the point in which there is no vacuum. This was then repeated three more times. After the third time, the liquid was then expelled out of the syringe by applying light pressure to the leaves, the liquid was saved, and the process was repeated again before the leaves were discarded. The extracted liquid was then sterile filtered using a Pall 0.2 μm Nylon syringe filter and then concentrated in a GE Healthcare Viva Spin 500, 10K mwco rinsing samples with an additional 20 mL of the buffer and spinning the samples down until they were concentrated about 30×.

[0414] The samples were then analyzed using standard Western Blotting techniques. Samples were prepared for a protein gel by mixing 10 μL of protein sample with 9 μL Invitrogen 2×SDS loading buffer and 2 μL Novex 10× Reducing agent and heating the sample at 85° C. for 5 minutes. The samples were then loaded and ran on a Novex Precast, 16% Tricine gel in 1× Invitrogen Tricine running buffer with 0.1% sodium thioglycolate in the top tank. The gel was run at 150V for 75 minutes. The gel was then transferred to a Novel PVDF membrane using a 7-minute transfer program on the iBLOT system. Once the transfer was complete, the blot membrane was then moved to a container and washed with Buffer A (1×TBS made from Quality Biological's 10×TBS (0.25M tris base, 1.37M NaCl, 0.03M KCL, pH 7.4)), for five minutes by rocking gently at room temperature. This was then followed with a blocking step using Buffer B (Buffer A with 1% BSA) for 1 hour. The blot was then rinsed three times with 5 minute washes of Buffer C (Buffer B with 0.05% Tween 20). This was followed with a 1:10000 dilution of Maine Biotech Anti-His antibody in Buffer C for 1 hour. The blot was then rinsed three times with Buffer C for 5 minutes each. This was followed with a 1:3000 dilution of BioRad goat anti-mouse AP conjugated antibody (secondary antibody) in Buffer C for 1 hour. The blot was then rinsed with two times with Buffer C for 5 minutes each and once with Buffer A for 5 minutes. The blot is then developed with BioRad AP developer and stopped by rinsing with water. The bands for the concentrated samples were then verified and diluted to make the bands similar in intensities/concentrations. The concentration of the samples was then also validated via iELISA to be between 10-20 ng/ul.

[0415] Indirect ELISA (iELISA) assay was performed as follows to quantitatively evaluate the ICK motif TP from the tobacco leaves transiently transformed with the FECT expression systems. 1 μL of the leaf extracted protein was diluted into 99 μL CB2 solution (Immunochemistry Technologies) in the well of an Immulon 2HD 96-well plate, with serial dilutions performed as necessary. Leaf proteins were from the extract samples were then allowed to coat the well walls for 3 hours in the dark at room temperature, and then the CB2 solution was removed, and each well was washed twice with 200 μL PBS (Gibco). 150 μL blocking solution (Block BSA in PBS with 5% non-fat dry milk) was then added into each well and incubated for 1 hour, in the dark, at room temperature. After the removal of the blocking solution and a PBS wash off the wells, 100 L of rabbit anti-U-ACTX-Hv1a antibody (primary antibody) (1:250 dilution in blocking solution) was added to each well and incubated for 1 hour in the dark at room temperature. The primary antibody was then removed and each well was washed with PBS 4 times. Then 100 μL of HRP-conjugated goat anti-rabbit antibody (secondary antibody, used at 1:1000 dilution in the blocking solution) was added into each well and incubated for 1 hour in the dark at room temperature. After removal of the secondary antibody and wash of the wells with PBS, 100 μL substrate solution (a 1:1 mixture of ABTS peroxidase substrate solution A and solution B, KPL) was added to each well, and the chromogenic reaction was allowed to go until sufficient color development was apparent. Then 100 μL of peroxidase stop solution was added to each well to stop the reaction. The light absorbance of each reaction mixture in the plate was read at 405 nm using a SpectroMax-M2 plate reader, with SoftMax Pro used as control software. Serially diluted known concentrations of pure U-ACTX-Hv1a samples were treated in the same manner as described above in the iELISA assay to generate a mass-absorbance standard curve for quantities analysis.

[0416] To determine pepsin cleavability of the Linkers, the peptides are digested with simulated gastric fluid (SGF, 35 mM NaCl, pH 1.2 with 1 mg/ml pepsin from porcine gastric mucosa). Purified protein samples were mixed with 1:3, SGF:protein (v:v) and were incubated shaking at 37° C. A sample is taken at 0, 2 and 10 minutes immediately prepared for a protein gel (see above). The samples were then run on a Western Blot using the technique described above. See FIG. 6.

[0417] To determine insect cleavability of the binary/tertiary peptides, the proteins were digested with gut extract isolated from Southern Corn Rootworm (Diabrotica undecimpunctata). Isolation of the gut contents is explained in Example A. 1. Prior to peptide digestion, the proteins were buffer exchanged into 100 mM Phosphate buffer, 150 mM NaCl, pH 5.83 using a GE Healthcare Viva Spin 20 returning the final volume to the same as the starting volume. Digests were carried out using SCR gut extract at a 1:3 dilution of SCR gut extract stock:protein (v:v) shaking at 500 rpm, 25° C. Samples were taken at 0, 30 and 210 minutes. Samples were then prepared for SDS-PAGE and western blot as described above.

[0418] The binary/tertiary peptides were also tested for cleavability against CEW gut extract (described in Example A. 1). The peptides were buffer exchanged, just like they were for the SCR assay above, into 200 mM Tris-HCl pH 8.1 150 mM NaCl. The assay conditions are repeated as listed above for SCR gut extract digest.

[0419] These protocols resulted in the creation and validation of candidate tertiary cleavable linking peptides intervening copies of a TP expressed in plant. Additional spacers to enhance cleavability were desired and they are detailed in section 1.3.

### Example 4. FRET Research and Spacers that Make Multiple Candidate Tertiary Cleavable Linking Peptides

[0420] From the experiments performed and described above two exemplary effective binary peptides, ALKLFV (SEQ ID NO: 1605) and IFVRLR (SEQ ID NO: 1619), gave rapid SGF cleavage and rapid LEP and COLEOP cleavage of the peptides in human (SGF) and insect (LEP) and (COLEOP) simulated gut environments.

[0421] In order for the binary cleavable linking peptide to cleave, a proteolytic enzyme has to be able to recognize and land on the recognized sequence. If the space is tight or too small, it may cause slower or lower digesting efficiency. By making the binary peptide a tertiary peptide using the most favorable amino acids for the conditions, the speed in which the peptides cleave should increase. The use of “spacers” allows for such increased peptidase cleavage and increased insecticidal activity.

[0422] Spacers

[0423] To screen for potential spacers, FRET peptides were ordered as the binary peptide ALKLFVZ1Z₂ and varied amino acids in positions Z₁ and Z₂. Some of the amino acids were screened as individuals and some were screened as pools. The peptides were re-suspended using 50% acetonitrile in water at a concentration of 2 μM of each peptide. For the one containing more than one FRET peptide, they were re-suspended so that each peptide was as 2 μM (assuming an equal portion of each one). These were then re-suspended and screened as described above for Round 1. The data does confirm that some amino acids in the Z position are more favorable than others. Table 7 shows representative amino acids for Z₁ and Z₂ based on the FRET peptide speed to cleave data. The greater the value of the slope in in Table 7 the greater the activity of the amino acid when part of a spacer. The column in Table 7 labeled “Slope” indicates the speed of cleavage of the Linker.

TABLE 7
Representative spacer sequences for increasing
speed to cleave for both X and Y conditions
with binary peptide ALKLFV (SEQ ID NO: 1605)

| Spacer sequence | Y Slope | X Slope |
|---|---|---|
| AM | 23461 | 13328 |
| LH | 36648 | 6278 |
| MN | 27088 | 3981 |
| ES | 24393 | 7394 |
| WQ | 26735 | 6880 |
| DT | 24393 | 7394 |

Sequences that decreased speed to cleave

| | | |
|---|---|---|
| PG | 1925 | −79 |
| IF | −5662 | −3064 |

[0424] An example of the gene construction for the transient Tobacco expression system can be seen in FIGS. 6A and 6B. For example shown in FIG. 6A, the Linker sequences ALKLFVGS (SEQ ID NO: 1660) and IFVRLRGS (SEQ ID NO: 1674) are represented in portions of FIG. 6A as (L). In gels, FIG. 7, these show as 2 top bands for intact 4× (w & w/o Ubiquitin). Example Linker sequence IGER is represented by portions of FIG. 6B. In gels it shows as 1 top band for intact 4×.

### Example 5. Cloning and Expression of an Insecticidal Transgenic Protein Containing Binary and Tertiary Cleavable Linking Peptides

[0425] This example details an example of methods to recover a transgenic corn plant with the stable expression of an insecticidal and/or nematicidal protein containing binary and tertiary cleavable linking peptides and a TP. There are three components to making in this example: (1) vector design, (2) plant transformation and regeneration, and (3) validation of expression of the intact protein.

[0426] The first component is the (standard binary) vector design required for corn transformation, which involves the creation of a vector which has two regions: a backbone (FIG. 8: white arrows) and a t-DNA region (FIG. 8: black arrows). The backbone has two components: an origin of replication (Ori or ori) and a selectable marker. The backbone described in this example has two Oris so it can be replicated in both E. coli for subcloning purposes (for example the ColE1 a high copy Ori) and Agrobacterium for propagation of the plasmid (for example the OriV a low copy ori and its trfA initiation protein). The backbone described in this example has a bacterial neomycin phosphotransferase II (nptll) gene for resistance to kanamycin. This gene allows the selection for E. coli or Agrobacterium transformed with the plasmid. The t-DNA region contains three components: borders, an expression cassette for selection of transgenic plant cells on tissue culture media, and an expression cassette for the stable expression of the transgenic promoter. T-DNA borders are repeat sequences (25 bp) that flank the T-DNA in direct orientation and delineate the region that the virulence genes will replicate and package for genetic transformation. In this example the backbone and the T-DNA sequences are published by Coutu et al., in, Transgenic Res (2007) 16:771-781, the disclosure of which is incorporated herein by reference in its entirety. In this example, the expression cassettes for both the selectable marker and the gene of interest (an insecticidal or nematicidal insecticidal and/or nematicidal protein containing binary and tertiary cleavable linking peptides and a TP) are similar in design and differ only in the region encoding the open reading frame (ORF) for their respective proteins.

[0427] A good example of this expression cassette is the corn Ubi-1 promoter and expression cassette defined by Christensen and Quail in Transgenic Res. 1996 May; 5(3):213-8, the disclosure of which is incorporated herein by reference in its entirety. The promoter region from a constitutively expressing gene cassette from a plant can be subcloned and the gene removed and replaced by a multicloning site (MCS) to drop in the other genes of interest. In the case of the Ubi-1 example the 906 bp promoter region (UBI-1 prom) promotes the transcription of an 81 bp 5′ untranslated region (5′UTR) and a Ubi-1 1025 bp intron (UBI-1 intron) which is followed by a MCS. The cassette is terminated by the insertion of a terminator sequence, in this example the terminator sequence is about 250 bp of nopaline synthase (NOS) 3′ untranslated sequence and polyadenylation signals. For the selectable marker cassette, the insertion of a gene which confers plant resistance to an herbicidal chemical can be used such that cells expressing that cassette will be resistant to the inclusion of the herbicidal chemical in the tissue culture media. In this example, the selectable marker gene can be a gene that encodes phosphinothricin acetyltransferase activity (see U.S. Pat. No. 5,648,477, the disclosure of which is incorporated herein by reference in its entirety).

[0428] The expression of an insecticidal transgenic protein containing binary and tertiary cleavable linking peptide and a TP is exemplified herein, specifically in Example A, where such a gene is transiently expressed in tobacco. The linear composition of the entire labeled exemplary corn transformation vector example can be seen in FIG. 8.

[0429] The second component to this example is corn plant transformation by standard binary vectors and subsequence transgenic plant regeneration which is well known in the art, and is defined and documented by Frame et al., Plant Physiology, May 2002, Vol. 129, pp. 13-22 and Vega et al., Plant Cell Rep (2008) 27:297-305, the disclosures of which are incorporated herein by reference in their entireties. Following these protocols will result in the recovery of a transgenic plant with the t-DNA described above.

[0430] The third component to this section is the validation of expression of the intact protein. Transgenic plant tissue can be prepared to isolate the total soluble protein and this can be quantified on an iELISA using a primary antibody specifically binds the TP recombinantly generated (as defined in Example A as provided herein). The intact nature of the protein can be validated using a similar total soluble protein isolation followed by a protein gel and western blotting procedures (also as defined and exemplified in Example A herein).

### Example 6. Subcloning and Expression of a Bt Cry Insecticidal Protein to Contain Binary and Tertiary Cleavable Linking Peptides

[0431] In some representative examples, protocols for the expression and synthesis of modified TPs are provided herein. In one example, further detailed below, modified Bt proteins are described that when exposed to the contents of insect and nematode and human gut environments, the Bt protein is more efficiently cleaved by the constituent insect or nematode proteases. The presence of the binary or tertiary cleavable peptide results in a more complete dissociation of the stabilizing or inactive region of the Bt protein resulting in the enhanced production of insecticidal and nematicidal TPs.

[0432] This example details how to subclone an exemplary Bt cry TP to contain binary and tertiary cleavable linking peptide (L). There are two steps to this example: The conversion of a Bt cry TP gene sequence to contain the binary or tertiary cleavable linking peptide (L) between a non-insecticidal domain (Bt_{inactive}) and an insecticidal domain (Bt_{active}) gene, and the creation of a plant expressing that gene.

[0433] The simplest method to insert a binary or tertiary cleavable peptide (L) into a cry gene is to order the synthesis of the DNA encoding the entire gene with the inserted sequence.

[0434] The Bt cry TP gene can be any number of genes; a good example of a Bt TP gene is the Cry3a gene. A variant of Cry3a gene can be found in Genbank as accession no. AX712174: Sequence 8 from Patent WO03018810, (accessible at blast.ncbi.nlm.nih.gov/Blast. cgi?PROGRAM=blastn&PAGE_TYPE=BlastSearch&LINK_LOC=blasthome) which is incorporated herein by reference in its entirety. This sequence is derived from a publication Walters et al., Appl. Environ. Microbiol. January 2008 vol. 74 no. 2 367-374, the disclosure of which is incorporated herein by reference in its entirety. In this publication, the authors replace a “VSS” wild-type three amino acid sequence with a “AAPF” four amino acid sequence in the domain I loop between alpha-helix 3 and alpha-helix 4, to increase the cleavage of the non-active 12 kDa domain I from the insecticidal or active 55 kDa remainder. The authors hypothesize this AAPF is recognized by the Chymotrypsin/Cathepsin G enzyme in gut of Diabrotica and leads to more rapid conversation of the full length 67 kDa protein to a cleavage and the 55 kDa form which is the insecticidal mature protein and exhibits specific binding to western corn rootworm brush border membrane compared to the 67 kDa form. This AAPF amino acid sequence was analyzed via FRET and yeast-produced dimers of the TP “U+2-ACTX-Hv1a” separated by AAPF amino acids in our hands and neither FRET nor protein showed any cleavability by human gastrointestinal proteases (data not shown). Thus, the peptide amino acid sequence AAPF used in the Walters et al. reference cited above is not a binary or tertiary cleavable linking peptide as described herein.

[0435] For the example of converting the Cry3a gene into one with an intervening binary or tertiary cleavable linking peptide, the cloning of the DNA sequence described in Walters et al. is performed such that the base pairs encoding the AAPF amino acids are removed and in their place (in frame) are the codons encoding the amino acids for a binary cleavable linking peptide ALKLFV (SEQ ID NO: 1605) or the tertiary cleavable linking peptide ALKLFVGS (SEQ ID NO: 1660). This would insert the cleavable binary or tertiary peptide between the propeptide (Bt_{inactive}) and the Bt active toxin (Bt_{active}) as illustrated in FIG. 3B where the cleavable binary or tertiary peptide is placed in frame between the inactive portion of the Bt TP (Bt_{inactive}) and the active portion of the Bt TP (Bt_{active}).

[0436] For the expression of a Bt Cry TP to contain a binary and/or a tertiary cleavable linking peptide, the DNA described above would be subcloned into the multi-cloning site within the insecticidal gene expression cassette, and transformed in corn as previously described by Example B.

### Example 7. Exemplary Binary Peptides

[0437] In some embodiments, the binary peptide of the present invention is the binary peptide that has an amino acid sequence that can be assembled by combining a sequence from the SGF screening Y set and the insect cleavability X set, in X-Y or Y-X orientation from the X sequences and Y sequences.

[0438] One embodiment of the sequences discovered from SGF screening, Y, are: AFF, AFG, AFI, AFL, AFV, AFY, AGF, AGL, AIF, AIL, ALF, ALG, ALI, ALL, ALY, AYF, AYL, DFF, DFG, DFI, DFL, DFY, DGF, DGL, DIF, DLF, DLG, DLY, DYF, DYL, EFF, EFG, EFI, EFL, EFY, EGF, EGL, EIF, ELF, ELG, ELY, EYF, EYL, FF, FFA, FFD, FFE, FFF, FFG, FFI, FFK, FFL, FFR, FFS, FFT, FFV, FFY, FGA, FGD, FGE, FGF, FGI, FGK, FGL, FGR, FGS, FGT, FGV, FGY, FLV, FLR, FYA, FYD, FYE, FYF, FYG, FYI, FYK, FYL, FYR, FYS, FYT, FYV, FYY, GFA, GFD, GFE, GFF, GFI, GFK, GFL, GFR, GFS, GFT, GFV, GFY, GGL, GIF, GIL, GLF, GLI, GLL, GLY, GYF, GYL, IF, IFA, IFF, IFG, IFI, IFL, IFV, IFY, IGF, IGL, IIF, IIL, ILF, ILG, ILI, ILL, ILY, IYF, IYL, LFA, LFF, LFG, LFI, LFL, LFV, LFY, LG, LGA, LGE, LGF, LGI, LGL, LGV, LGY, LIF, LIG, LII, LIL, LIY, LLF, LLG, LLI, LLL, LLY, LYA, LYF, LYG, LYI, LYL, LYV, LYY, NFF, NFG, NFI, NFL, NFY, NGF, NGL, NIL, NLG, NLI, NLL, NYF, NYL, QFF, QFG, QFI, QFL, QFY, QGF, QGL, QIL, QLG, QLI, QLL, QYF, QYL, SFF, SFG, SFI, SFL, SFY, SGF, SGL, SIF, SIL, SLF, SLG, SLI, SLL, SLY, SYF, SYL, TFF, TFG, TFI, TFL, TFY, TGF, TGL, TIF, TIL, TLF, TLG, TLI, TLL, TLY, TYF, TYL, VFF, VFG, VFI, VFL, VFY, VGF, VGL, VIF, VIL, VLF, VLG, VLI, VLL, VLY, VYF, VYL, YFA, YFD, YFE, YFF, YFG, YFI, YFK, YFL, YFR, YFS, YFT, YFV, YFY, YGF, YGL, YYF, YYL.

[0439] Another embodiment of the sequences discovered from SGF screening, Y, are: AFF, AFI, AFL, AFY, AIF, AIL, ALF, ALI, ALL, ALY, AYF, AYL, DFF, DFI, DFL, DFY, DIF, DLF, DLY, DYF, DYL, YFL, EFF, EFI, EFL, 0, EFY, EIF, ELF, ELY, EYF, EYL, FFA, FFD, FFE, FFF, FFI, FFK, FFL, FFR, FFS, FFT, FFV, FFY, FYA, FYD, FYE, FYF, FYI, FYK, FYL, FYR, FYS, FYT, FYV, FYY, IFA, IFF, IFI, IFL, IFV, IFY, IIF, IIL, ILF, ILI, ILL, ILY, IYF, IYL, LFA, LFF, LFI, LFL, LFV, LFY, LIF, LII, LIL, LIY, LLF, LLI, LLL, LLY, LYA, LYF, LYI, LYL, LYV, LYY, NFF, NFI, NFL, NFY, NIL, NLI, NLL, NYF, NYL, QFF, QFI, QFL, QFY, QIL, QLI, QLL, QYF, QYL, SFF, SFI, SFL, SFY, SIF, SIL, SLF, SLI, SLL, SLY, SYF, SYL, TFF, TFI, TFL, TFY, TIF, TIL, TLF, TLI, TLL, TLY, TYF, TYL, VFF, VFI, VFL, VFY, VIF, VIL, VLF, VLI, VLL, VLY, VYF, VYL, YFA, YFD, YFE, YFF, YFI, YFK, YFL, YFR, YFS, YFT, YFV, YFY, YYF, YYL.

[0440] One embodiment of the sequences discovered from insect cleavability, X, are: AAG, AAK, AAR, AFG, AFK, AFR, AGF, AGI, AGK, AGL, AGN, AGQ, AGR, AGS, AGT, AGY, AIG, AIK, AIN, AIQ, AIR, AKF, AKG, AKI, AKK, AKL, AKN, AKQ, AKR, AKS, AKT, AKY, ALG, ALK, ALN, ALQ, ALR, APF, APG, APK, APR, ARF, ARG, ARI, ARK, ARL, ARN, ARQ, ARR, ARS, ART, ARY, ASG, ASK, ASR, ATG, ATK, ATR, AVG, AVK, AVR, AYG, AYK, AYR, DGK, DGR, DIG, DIK, DIR, DLG, DLK, DLR, EGK, EGR, EIG, EIK, EIR, ELG, ELK, ELR, ER, FVR, GAF, GAI, GAK, GAL, GAR, GAY, GFK, GFR, GIK, GIN, GIQ, GIR, GKA, GKD, GKE, GKF, GKI, GKK, GKL, GKN, GKQ, GKR, GKS, GKT, GKV, GKY, GLK, GLN, GLQ, GLR, GNA, GNK, GNR, GNV, GPK, GPR, GQA, GQK, GQR, GQV, GRA, GRD, GRE, GRF, GRI, GRK, GRL, GRN, GRQ, GRR, GRS, GRT, GRV, GRY, GSI, GSK, GSL, GSR, GTI, GTK, GTL, GTR, GVF, GVI, GVK, GVL, GVR, GVY, GYK, GYR, IGA, IGF, IGI, IGK, IGL, IGN, IGQ, IGR, IGS, IGT, IGV, IGY, IIG, IIK, IIR, IKA, IKF, IKG, IKI, IKK, IKL, IKN, IKQ, IKR, IKS, IKT, IKV, IKY, ILG, ILK, ILR, INA, ING, INK, INR, INV, IPG, IPK, IPR, IQA, IQG, IQK, IQR, IQV, IRA, IRF, IRG, IRI, IRK, IRL, IRN, IRQ, IRR, IRS, IRT, IRV, IRY, ISG, ISK, ISR, ITG, ITK, ITR, KAF, KAG, KAI, KAK, KAL, KAR, KAY, KFF, KFG, KFK, KFR, KGA, KGD, KGE, KGF, KGI, KGK, KGL, KGN, KGQ, KGR, KGS, KGT, KGV, KGY, KIG, KIK, KIN, KIQ, KIR, KKA, KKD, KKE, KKF, KKG, KKN, KKQ, KKS, KKT, KKV, KKY, KLG, KLK, KLN, KLQ, KLR, KNG, KNK, KNR, KPG, KPK, KPR, KQG, KQK, KQR, KRA, KRD, KRE, KRF, KRG, KRN, KRQ, KRS, KRT, KRV, KRY, KSG, KSI, KSK, KSL, KSR, KTG, KTI, KTK, KTL, KTR, KVF, KVG, KVI, KVK, KVL, KVR, KVY, KYG, KYK, KYR, LFR, LGA, LGF, LGI, LGK, LGL, LGN, LGQ, LGR, LGS, LGT, LGV, LGY, LIG, LIK, LIR, LK, LKA, LKF, LKG, LKI, LKK, LKL, LKN, LKQ, LKR, LKS, LKT, LKV, LKY, LLG, LLK, LLR, LNA, LNG, LNK, LNR, LNV, LPG, LPK, LPR, LQA, LQG, LQK, LQR, LQV, LRA, LRF, LRG, LRI, LRK, LRL, LRN, LRQ, LRR, LRS, LRT, LRV, LRY, LSG, LSK, LSR, LTG, LTK, LTR, NGK, NGR, NIG, NIK, NIR, NLG, NLK, NLR, PGK, PGR, PIG, PIK, PIR, PKG, PKK, PKR, PLG, PLK, PLR, PRG, PRK, PRR, QGK, QGR, QIG, QIK, QIR, QLG, QLK, QLR, RAF, RAG, RAI, RAK, RAL, RAR, RAY, RFF, RFG, RFK, RFR, RGA, RGD, RGE, RGF, RGI, RGK, RGL, RGN, RGQ, RGR, RGS, RGT, RGV, RGY, RIG, RIK, RIN, RIQ, RIR, RKA, RKD, RKE, RKF, RKG, RKK, RKN, RKQ, RKS, RKT, RKV, RKY, RLF, RLFL, RLG, RLK, RLN, RLQ, RLR, RNG, RNK, RNR, RPG, RPK, RPR, RQG, RQK, RQR, RRA, RRD, RRE, RRF, RRG, RRK, RRN, RRQ, RRR, RRS, RRT, RRV, RRY, RSG, RSI, RSK, RSL, RSR, RTG, RTI, RTK, RTL, RTR, RVF, RVG, RVI, RVK, RVL, RVR, RVY, RYG, RYK, RYR, VAG, VAK, VAR, VFG, VFK, VFR, VGF, VGI, VGK, VGL, VGN, VGQ, VGR, VGS, VGT, VGY, VIG, VIK, VIN, VIQ, VIR, VKF, VKG, VKI, VKK, VKL, VKN, VKQ, VKR, VKS, VKT, VKY, VLG, VLK, VLN, VLQ, VLR, VPG, VPK, VPR, VR, VRF, VRG, VRI, VRK, VRL, VRN, VRQ, VRR, VRS, VRT, VRY, VSG, VSK, VSR, VTG, VTK, VTR, VVG, VVK, VVR, VYG, VYK, VYR.

[0441] Another embodiment of the sequences discovered from insect cleavability, X, are: AAK, AAR, AFK, AFR, AIK, AIN, AIQ, AIR, AKF, AKI, AKK, AKL, AKN, AKQ, AKR, AKS, AKT, AKY, ALK, ALN, ALQ, ALR, APK, APR, ARF, ARI, ARK, ARL, ARN, ARQ, ARR, ARS, ART, ARY, ASK, ASR, ATK, ATR, AVK, AVR, AYK, AYR, DIK, DIR, DLK, DLR, EIK, EIR, ELK, ELR, IIK, IIR, IKA, IKF, IKI, IKK, IKL, IKN, IKQ, IKR, IKS, IKT, IKV, IKY, ILK, ILR, INA, INK, INR, INV, IPK, IPR, IQA, IQK, IQR, IQV, IRA, IRF, IRI, IRK, IRL, IRN, IRQ, IRR, IRS, IRT, IRV, IRY, ISK, ISR, ITK, ITR, KAF, KAI, KAK, KAL, KAR, KAY, KFK, KFR, KIK, KIN, KIQ, KIR, KKA, KKD, KKE, KKF, KKN, KKQ, KKS, KKT, KKV, KKY, KLK, KLN, KLQ, KLR, KNK, KNR, KPK, KPR, KQK, KQR, KRA, KRD, KRE, KRF, KRN, KRQ, KRS, KRT, KRV, KRY, KSI, KSK, KSL, KSR, KTI, KTK, KTL, KTR, KVF, KVI, KVK, KVL, KVR, KVY, KYK, KYR, LIK, LIR, LKA, LKF, LKI, LKK, LKL, LKN, LKQ, LKR, LKS, LKT, LKV, LKY, LLK, LLR, LNA, LNK, LNR, LNV, LPK, LPR, LQA, LQK, LQR, LQV, LRA, LRF, LRI, LRK, LRL, LRN, LRQ, LRR, LRS, LRT, LRV, LRY, LSK, LSR, LTK, LTR, NIK, NIR, NLK, NLR, PIK, PIR, PKK, PKR, PLK, PLR, PRK, PRR, QIK, QIR, QLK, QLR, RAF, RAI, RAK, RAL, RAR, RAY, RFK, RFR, RIK, RIN, RIQ, RIR, RKA, RKD, RKE, RKF, RKN, RKQ, RKS, RKT, RKV, RKY, RLK, RLN, RLQ, RLR, RNK, RNR, RPK, RPR, RQK, RQR, RRA, RRD, RRE, RRF, RRN, RRQ, RRS, RRT, RRV, RRY, RSI, RSK, RSL, RSR, RTI, RTK, RTL, RTR, RVF, RVI, RVK, RVL, RVR, RVY, RYK, RYR, VAK, VAR, VFK, VFR, VIK, VIN, VIQ, VIR, VKF, VKI, VKK, VKL, VKN, VKQ, VKR, VKS, VKT, VKY, VLK, VLN, VLQ, VLR, VPK, VPR, VRF, VRI, VRK, VRL, VRN, VRQ, VRR, VRS, VRT, VRY, VSK, VSR, VTK, VTR, VVK, VVR, VYK, VYR.

### Example 8. The Insecticidal Efficacy of a Transgenic Plant Expressing the Insecticidal and/or Nematicidal Proteins of the Present Invention

[0442] Transgenic corn plants were made using the vector described in FIG. 8. The ORF comprising the components STA, L, and TP was defined by FIG. 6B and prepared as a polynucleotide operable for transformation into corn plant cells. A field trial was performed by planting seeds at 6 inch spacing, with 125 seeds per row with 6 reps. The UTC corn line was the parent line used as an explant for corn transformation and the transgenic corn line was the resulting transgenic plant expressing the transgene of FIG. 6B. Each plant was infested with 600 western corn rootworm eggs and then scored once the crop reached maturity. Scoring was performed on a 0-3 scale where the three whorls of roots underground were scored for damage using (Oleson, J. D., Y. Park, T. M. Nowatzki, and J. J. Tollefson. 2005. J. Econ Entomol. 98(1):1-8). A 0 score represents no damage. A 3 score represents that all 3 root whorls were destroyed. The Field trial data of non-transgenic and transgenic corn plants where transgenic plants displayed reduced damage by western corn rootworm shown in FIG. 9 is the average score of 30 plants, 5 from each of the 6 reps picked at random. The transgenic plant comprising the insecticidal and/or nematicidal protein shown in FIG. 6B turned in a score of 1.55 damage compared to the 1.90 damage in the untransformed corn line that was used as an explant to generate the transgenic corn line. The use of the insecticidal and/or nematicidal protein shown in FIG. 6B when transformed into corn demonstrates the efficacy of the transgene in controlling a pest of corn, western corn rootworm.

The application's sequence listing, which the Patent Office published only in electronic form, follows.

SEQUENCE LISTING (1775 sequences)

SEQ ID NO: 1 - protein, 4 aa, Pisum sativum
IGER

SEQ ID NO: 2 - protein, 5 aa, Nicotiana attenuata
EEKKN

SEQ ID NO: 3 - protein, 8 aa, Nicotiana tabacum
ETMFKHGL

SEQ ID NO: 4 - protein, 24 aa, Hordeum vulgare
MANKHLSLSLFLVLLGLSASLASG

SEQ ID NO: 5 - protein, 39 aa, Hadronyche versuta
GSCVPVDQPCSLNTQPCCDDATCTQERNENGHTVYYCRA

SEQ ID NO: 6 - protein, 39 aa, Hadronyche versuta
QYCVPVDQPCSLNTQPCCDDATCTQELNENANPVYYCRA

SEQ ID NO: 7 - protein, 238 aa, Aequorea victoria
ASKGEELFTGVVPILVELDGDVNGHKFSVSGEGEGDATYGKLTLKFICTTGKLPVPWPTLVTTFSYGVQCFSRYPDHMKRHDFFKSAMPEGYVQERTISFKDDGNYKTRAEVKFEGDTLVNRIELKGIDFKEDGNILGHKLEYNYNSHNVYITADKQKNGIKANFKIRHNIEDGSVQLADHYQQNTPIGDGPVLLPDNHYLSTQSALSKDPNEKRDHMVLLEFVTAAGITHGMDELYK

SEQ ID NO: 8 - protein, 38 aa, Hadronyche versuta
MSPTCIPSGQPCPYNENCCSQSCTFKENENGNTVKRCD

SEQ ID NO: 9 - protein, 61 aa, Hadronyche versuta
MANKHLSLSLFLVLLGLSASLASGSPTCIPSGQPCPYNENCCSQSCTFKENENGNTVKRCD

SEQ ID NO: 10 - protein, 282 aa, Hadronyche versuta
MASKGEELFTGVVPILVELDGDVNGHKFSVSGEGEGDATYGKLTLKFICTTGKLPVPWPTLVTTFSYGVQCFSRYPDHMKRHDFFKSAMPEGYVQERTISFKDDGNYKTRAEVKFEGDTLVNRIELKGIDFKEDGNILGHKLEYNYNSHNVYITADKQKNGIKANFKIRHNIEDGSVQLADHYQQNTPIGDGPVLLPDNHYLSTQSALSKDPNEKRDHMVLLEFVTAAGITHGMDELYKIGERQYCVPVDQPCSLNTQPCCDDATCTQERNENGHTVYYCRA

SEQ ID NO: 11 - protein, 305 aa, Hadronyche versuta
MANKHLSLSLFLVLLGLSASLASGASKGEELFTGVVPILVELDGDVNGHKFSVSGEGEGDATYGKLTLKFICTTGKLPVPWPTLVTTFSYGVQCFSRYPDHMKRHDFFKSAMPEGYVQERTISFKDDGNYKTRAEVKFEGDTLVNRIELKGIDFKEDGNILGHKLEYNYNSHNVYITADKQKNGIKANFKIRHNIEDGSVQLADHYQQNTPIGDGPVLLPDNHYLSTQSALSKDPNEKRDHMVLLEFVTAAGITHGMDELYKIGERQYCVPVDQPCSLNTQPCCDDATCTQERNENGHTVYYCRA

SEQ ID NO: 12 - protein, 39 aa, Hadronyche versuta
QYCVPVDQPCSLNTQPCCDDATCTQERNENGHTVYYCRA

SEQ ID NO: 13 - protein, 239 aa, Aequorea victoria
MASKGEELFTGVVPILVELDGDVNGHKFSVSGEGEGDATYGKLTLKFICTTGKLPVPWPTLVTTFSYGVQCFSRYPDHMKRHDFFKSAMPEGYVQERTISFKDDGNYKTRAEVKFEGDTLVNRIELKGIDFKEDGNILGHKLEYNYNSHNVYITADKQKNGIKANFKIRHNIEDGSVQLADHYQQNTPIGDGPVLLPDNHYLSTQSALSKDPNEKRDHMVLLEFVTAAGITHGMDELYK

SEQ ID NO: 14 - DNA, 932 bp, Agrobacterium tumefaciens
ttaattaaatggctaataaacacctgagtttgtcactattcctcgtgttgctcgggttatctgcttcacttgcaagcggagctagcaaaggagaagaacttttcactggagttgtcccaattcttgttgaattagatggtgatgttaatgggcacaaattttctgtcagtggagagggtgaaggtgatgctacatacggaaagcttacccttaaatttatttgcactactggaaaactacctgttccatggccaacacttgtcactactttctcttatggtgttcaatgcttttcccgttatccggatcatatgaaacggcatgactttttcaagagtgccatgcccgaaggttatgtacaggaacgcactatatctttcaaagatgacgggaactacaagacgcgtgctgaagtcaagtttgaaggtgatacccttgttaatcgtatcgagttaaaaggtattgattttaaagaagatggaaacattctcggacacaaactcgagtacaactataactcacacaatgtatacatcacggcagacaaacaaaagaatggaatcaaagctaacttcaaaattcgccacaacattgaagatggatccgttcaactagcagaccattatcaacaaaatactccaattggcgatggccctgtccttttaccagacaaccattacctgtcgacacaatctgccctttcgaaagatcccaacgaaaagcgtgaccacatggtccttcttgagtttgtaactgctgctgggattacacatggcatggatgagctctacaaaattggtgaaagacaatattgtgttccagttgatcaaccatgttctcttaatactcaaccatgttgtgatgatgctacttgtactcaagaaagaaatgaaaatggacatactgtttattattgtagagcttaacctagg

SEQ ID NO: 15 - DNA, 849 bp, Nicotiana benthamiana
atggctagcaaaggagaagaacttttcactggagttgtcccaattcttgttgaattagatggtgatgttaatgggcacaaattttctgtcagtggagagggtgaaggtgatgctacatacggaaagcttacccttaaatttatttgcactactggaaaactacctgttccatggccaacacttgtcactactttctcttatggtgttcaatgcttttcccgttatccggatcatatgaaacggcatgactttttcaagagtgccatgcccgaaggttatgtacaggaacgcactatatctttcaaagatgacgggaactacaagacgcgtgctgaagtcaagtttgaaggtgatacccttgttaatcgtatcgagttaaaaggtattgattttaaagaagatggaaacattctcggacacaaactcgagtacaactataactcacacaatgtatacatcacggcagacaaacaaaagaatggaatcaaagctaacttcaaaattcgccacaacattgaagatggatccgttcaactagcagaccattatcaacaaaatactccaattggcgatggccctgtccttttaccagacaaccattacctgtcgacacaatctgccctttcgaaagatcccaacgaaaagcgtgaccacatggtccttcttgagtttgtaactgctgctgggattacacatggcatggatgagctctacaaaattggtgaaagacaatattgtgttccagttgatcaaccatgttctcttaatactcaaccatgttgtgatgatgctacttgtactcaagaaagaaatgaaaatggacatactgtttattattgtagagcttaa

SEQ ID NO: 16 - protein, 4 aa, Nicotiana benthamiana
KDEL

SEQ ID NO: 17 - DNA, 930 bp, Nicotiana benthamiana
atggctaataaacacctgagtttgtcactattcctcgtgttgctcgggttatctgcttcacttgcaagcggagctagcaaaggagaagaacttttcactggagttgtcccaattcttgttgaattagatggtgatgttaatgggcacaaattttctgtcagtggagagggtgaaggtgatgctacatacggaaagcttacccttaaatttatttgcactactggaaaactacctgttccatggccaacacttgtcactactttctcttatggtgttcaatgcttttcccgttatccggatcatatgaaacggcatgactttttcaagagtgccatgcccgaaggttatgtacaggaacgcactatatctttcaaagatgacgggaactacaagacgcgtgctgaagtcaagtttgaaggtgatacccttgttaatcgtatcgagttaaaaggtattgattttaaagaagatggaaacattctcggacacaaactcgagtacaactataactcacacaatgtatacatcacggcagacaaacaaaagaatggaatcaaagctaacttcaaaattcgccacaacattgaagatggatccgttcaactagcagaccattatcaacaaaatactccaattggcgatggccctgtccttttaccagacaaccattacctgtcgacacaatctgccctttcgaaagatcccaacgaaaagcgtgaccacatggtccttcttgagtttgtaactgctgctgggattacacatggcatggatgagctctacaaaattggtgaaagacaatattgtgttccagttgatcaaccatgttctattaatactcaaccatgttgtgatgatgctacttgtactcaagaaagaaatgaaaatggacatactgtttattattgtagagctaaagatgagctctaa

SEQ ID NO: 18 - protein, 26 aa, Nicotiana benthamiana
MGKMASLFASLLVVLVSLSLASESSA

SEQ ID NO: 19 - protein, 26 aa, Nicotiana benthamiana
MGKMASLFATFLVVLVSLSLASESSA

SEQ ID NO: 20 - DNA, 78 bp, Nicotiana benthamiana
atgggtaagatggcttctctgtttgcttctctgctggttgttctggtttctctgtctctggcttctgaatcttctgct

SEQ ID NO: 21 - DNA, 938 bp, Nicotiana benthamiana
ttaattaaatgggtaagatggcttctctgtttgcttctctgctggttgttctggtttctctgtctctggcttctgaatcttctgctgctagcaaaggagaagaacttttcactggagttgtcccaattcttgttgaattagatggtgatgttaatgggcacaaattttctgtcagtggagagggtgaaggtgatgctacatacggaaagcttacccttaaatttatttgcactactggaaaactacctgttccatggccaacacttgtcactactttctcttatggtgttcaatgcttttcccgttatccggatcatatgaaacggcatgactttttcaagagtgccatgcccgaaggttatgtacaggaacgcactatatctttcaaagatgacgggaactacaagacgcgtgctgaagtcaagtttgaaggtgatacccttgttaatcgtatcgagttaaaaggtattgattttaaagaagatggaaacattctcggacacaaactcgagtacaactataactcacacaatgtatacatcacggcagacaaacaaaagaatggaatcaaagctaacttcaaaattcgccacaacattgaagatggatccgttcaactagcagaccattatcaacaaaatactccaattggcgatggccctgtccttttaccagacaaccattacctgtcgacacaatctgccctttcgaaagatcccaacgaaaagcgtgaccacatggtccttcttgagtttgtaactgctgctgggattacacatggcatggatgagctctacaaaattggtgaaagacaatattgtgttccagttgatcaaccatgttctcttaatactcaaccatgttgtgatgatgctacttgtactcaagaaagaaatgaaaatggacatactgtttattattgtagagcttaacctagg

SEQ ID NO: 22 - DNA, 78 bp, Nicotiana benthamiana
atgggtaagatggcttctctgtttgctacttttctggttgttctggtttctctgtctctggcttctgaatcttctgct

SEQ ID NO: 23 - DNA, 938 bp, Nicotiana benthamiana
ttaattaaatgggtaagatggcttctctgtttgctacttttctggttgttctggtttctctgtctctggcttctgaatcttctgctgctagcaaaggagaagaacttttcactggagttgtcccaattcttgttgaattagatggtgatgttaatgggcacaaattttctgtcagtggagagggtgaaggtgatgctacatacggaaagcttacccttaaatttatttgcactactggaaaactacctgttccatggccaacacttgtcactactttctcttatggtgttcaatgcttttcccgttatccggatcatatgaaacggcatgactttttcaagagtgccatgcccgaaggttatgtacaggaacgcactatatctttcaaagatgacgggaactacaagacgcgtgctgaagtcaagtttgaaggtgatacccttgttaatcgtatcgagttaaaaggtattgattttaaagaagatggaaacattctcggacacaaactcgagtacaactataactcacacaatgtatacatcacggcagacaaacaaaagaatggaatcaaagctaacttcaaaattcgccacaacattgaagatggatccgttcaactagcagaccattatcaacaaaatactccaattggcgatggccctgtccttttaccagacaaccattacctgtcgacacaatctgccctttcgaaagatcccaacgaaaagcgtgaccacatggtccttcttgagtttgtaactgctgctgggattacacatggcatggatgagctctacaaaattggtgaaagacaatattgtgttccagttgatcaaccatgttctcttaatactcaaccatgttgtgatgatgctacttgtactcaagaaagaaatgaaaatggacatactgtttattattgtagagcttaacctagg

SEQ ID NO: 24 - protein, 37 aa, Hadronyche versuta
SPTCIPSGQPCPYNENCCSQSCTFKENENGNTVKRCD

SEQ ID NO: 25 - protein, 224 aa, Juniperus ashei
MARVSELAFLLAATLAISLHMQEAGVVKFDIKNQCGYTVWAAGLPGGGKRLDQGQTWTVNLAAGTASARFWGRTGCTFDASGKGSCQTGDCGGQLSCTVSGAVPATLAEYTQSDQDYYDVSLVDGFNIPLAINPTNAQCTAPACKADINAVCPSELKVDGGCNSACNVFKTDQYCCRNAYVDNCPATNYSKIFKNQCPQAYSYAKDDTATFACASGTDYSIVFC

SEQ ID NO: 26 - protein, 197 aa, Juniperus ashei
KFDIKNQCGYTVWAAGLPGGGKRLDQGQTWTVNLAAGTASARFWGRTGCTFDASGKGSCQTGDCGGQLSCTVSGAVPATLAEYTQSDQDYYDVSLVDGFNIPLAINPTNAQCTAPACKADINAVCPSELKVDGGCNSACNVFKTDQYCCRNAYVDNCPATNYSKIFKNQCPQAYSYAKDDTATFACASGTDYSIVFC

SEQ ID NO: 27 - protein, 27 aa, Juniperus ashei
MARVSELAFLLAATLAISLHMQEAGVV

SEQ ID NO: 28 - protein, 105 aa, Galanthus nivalis
DNILYSGETLSTGEFLNYGSFVFIMQEDCNLVLYDVDKPIWATNTGGLSRSCFLSMQTDGNLVVYNPSNKPIWASNTGGQNGNYVCILQKDRNVVIYGTDRWATG

SEQ ID NO: 29 - protein, 29 aa, Kluyveromyces lactis
GSRSCCPCYWGGCPWGQNCYPEGCSGPKV

SEQ ID NO: 30 - protein, 27 aa, Kluyveromyces lactis
RSCCPCYWGGCPWGQNCYPEGCSGPKV

SEQ ID NO: 31 - DNA, 366 bp, Hordeum Vulgare
aagcttgaaaaaaatgaaattttccactattttagcagcatctacagctttaatcagtgttgtcatggctgcacctgtgagtaccgaaacagatatagacgaccttccaatctctgttccagaagaggctttgataggattcatcgatttgactggtgatgaagtttcattgttaccagtgaataatggtacccatactggtattttgttcctaaacaccacaattgctgaagctgcttttgcagataaggatgatttggagaaaagaggttctagatcatgctgcccttgttactggggtggttgtccatggggacaaaactgttatcctgaaggatgttctggtccaaaggtatgagcggccgc

SEQ ID NO: 32 - DNA, 360 bp, Anemonia Viridis
aagcttgaaaaaaatgaaattttccacaatcttagctgcaagtactgctcttatttctgttgtgatggctgctccagtatctaccgaaacagatatcgatgatttgccaatttcagtccctgaagaggcactaatcggattcattgacttaaccggtgatgaagtgagtttgttgccagttaacaacggtactcatacaggtatattgtttttgaataccactatagctgaagcagcattcgctgataaagatgacttagaaaagagaagatcatgctgcccttgttactggggtggttgtccatggggtcaaaattgttatccagagggttgttctggacctaaggtttgagcggccgc

SEQ ID NO: 33 - protein, 675 aa, Bacillus thuringiensis israelensis
MNPYQNKNEYEIFNAPSNGFSKSNNYSRYPLANKPNQPLKNTNYKDWLNVCQDNQQYGNNAGNFASSETIVGVSAGIIVVGTMLGAFAAPVLAAGIISFGTLLPIFWQGSDPANVWQDLLNIGGRPIQEIDKNIINVLTSIVTPIKNQLDKYQEFFDKWEPARTHANAKAVHDLFTTLEPIIDKDLDMLKNNASYRIPTLPAYAQIATWHLNLLKHAATYYNIWLQNQGINPSTFNSSNYYQGYLKRKIQEYTDYCIQTYNAGLTMIRTNTNATWNMYNTYRLEMTLTVLDLIAIFPNYDPEKYPIGVKSELIREVYTNVNSDTFRTITELENGLTRNPTLFTWINQGRFYTRNSRDILDPYDIFSFTGNQMAFTHTNDDRNIIWGAVHGNIISQDTSKVFPFYRNKPIDKVEIVRHREYSDIIYEMIFFSNSSEVFRYSSNSTIENNYKRTDSYMIPKQTWKNEEYGHTLSYIKTDNYIFSVVRERRRVAFSWTHTSVDFQNTIDLDNITQIHALKALKVSSDSKIVKGPGHTGGDLVILKDSMDFRVRFLKNVSRQYQVRIRYATNAPKTTVFLTGIDTISVELPSTTSRQNPNATDLTYADFGYVTFPRTVPNKTFEGEDTLLMTLYGTPNHSYNIYIDKIEFIPITQSVLDYTEKQNIEKTQKIVNDLFVN

SEQ ID NO: 34 - protein, 675 aa, Bacillus thuringiensis israelensis
MNPYQNKNEYEIFNAPSNGFSKSNNYSRYPLANKPNQPLKNTNYKDWLNVCQDNQQYGNNAGNFASSETIVGVSAGIIVVGTMLGAFAAPVLAAGIISFGTLLPIFWQGSDPANVWQDLLNIGGRPIQEIDKNIINVLTSIVTPIKNQLDKYQEFFDKWEPARTHANAKAVHDLFTTLEPIIDKDLDMLKNNASYRIPTLPAYAQIATWHLNLLKHAATYYNIWLQNQGINPSTFNSSNYYQGYLKRKIQEYTDYCIQTYNAGLTMIRTNTNATWNMYNTYRLEMTLTVLDLIAIFPNYDPEKYPIGVKSELIREVYTNVNSDTFRTITELENGLTRNPTLFTWINQGRFYTRNSRDILDPYDIFSFTGNQMAFTHTNDDRNIIWGAVHGNIISQDTSKVFPFYRNKPIDKVEIVRHREYSDIIYEMIFFSNSSEVFRYSSNSTIENNYKRTDSYMIPKQTWKNKEYGHTLSYIKTDNYIFSVVRERRRVAFSWTHTSVDFQNTIDLDNITQIHALKALKVSSDSKIVKGPGHTGGDLVILKDSMDFRVRFLKNVSRQYQVRIRYATNAPKTTVFLTGIDTISVELPSTTSRQNPNATDLTYADFGYVTFPRTVPNKTFEGEDTLLMTLYGTPNHSYNIYIDKIEFIPITQSVLDYTEKQNIEKTQKIVNDLFVN

SEQ ID NO: 35 - protein, 675 aa, Bacillus thuringiensis s. israelensis BRC-LLP29; identical to SEQ ID NO: 34

SEQ ID NO: 36 - protein, 643 aa, Bacillus thuringiensis israelensis
MEDSSLDTLSIVNETDFPLYNNYTEPTIAPALIAVAPIAQYLATAIGKWAAKAAFSKVLSLIFPGSQPATMEKVRTEVETLINQKLSQDRVNILNAEYRGIIEVSDVFDAYIKQPGFTPATAKGYFLNLSGAIIQRLPQFEVQTYEGVSIALFTQMCTLHLTLLKDGILAGSAWGFTQADVDSFIKLFNQKVLDYRTRLMRMYTEEFGRLCKVSLKDGLTFRNMCNLYVFPFAEAWSLMRYEGLKLQSSLSLWDYVGVSIPVNYNEWGGLVYKLLMGEVNQRLTTVKFNYSFTNEPADIPARENIRGVHPIYDPSSGLTGWIGNGRTNNFNFADNNGNEIMEVRTQTFYQNPNNEPIAPRDIINQILTAPAPADLFFKNADINVKFTQWFQSTLYGWNIKLGTQTVLSSRTGTIPPNYLAYDGYYIRAISACPRGVSLAYNHDLTTLTYNRIEYDSPTTENIIVGFAPDNTKDFYSKKSHYLSETNDSYVIPALQFAEVSDRSFLEDTPDQATDGSIKFARTFISNEAKYSIRLNTGFNTATRYKLIIRVRVPYRLPAGIRVQSQNSGNNRMLGSFTANANPEWVDFVTDAFTFNDLGITTSSTNALFSISSDSLNSGEEWYLSQLFLVKESAFTTQINPLLK

SEQ ID NO: 37 - protein, 78 aa, Bacillus thuringiensis israelensis
NSGNNRMLGSFTANANPEWVDFVTDAFTFNDLGITTSSTNALFSISSDSLNSGEEWYLSQLFLVKESAFTTQINPLLK

SEQ ID NO: 38 - protein, 643 aa, Bacillus thuringiensis israelensis; identical to SEQ ID NO: 36

SEQ ID NO: 39 - protein, 643 aa, Bacillus thuringiensis s. israelensis BRC-LLP29
MNYMEDSSLDTLSIVNETDFPLYNNYTEPTIAPALIAVAPIAQYLATAIGKWAAKAAFSKVLSLIFPGSQPATMEKVRTEVETLINQKLSQDRVNILNAEYRGIIEVSDVFDAYIKQPGFTPATAKGYFLNLSGAIIQRLPQFEVQTYEGVSIALFTQMCTLHLTLLKDGILAGSAWGFTQADVDSFIKLFNQKVLDYRTRLMRMYTEEFGRLCKVSLKDGLTFRNMCNLYVFPFAEAWSLMRYEGLKLQSSLSLWDYVGVSIPVNYNEWGGLVYKLLMGEVNQRLTTVKFNYSFTNEPADIPARENIRGVHPIYDPSSGLTGWIGNGRTNNFNFADNNGNEIMEVRTQTFYQNPNNEPIAPRDIINQILTAPAPADLFFKNADINVKFTQWFQSTLYGWNIKLGTQTVLSSRTGTIPPNYLAYDGYYIRAISACPRGVSLAYNHDLTTLTYNRIEYDSPTTENIIVGFAPDNTKDFYSKKSHYLSETNDSYVIPALQFAEVSDRSFLEDTPDQATDGSIKFARTFISNEAKYSIRLNTGFNTATRYKLIIRVRVPYRLPAGIRVQSQNSGNNRMLGSFTANANPEWVDFVTDAFTFNDLGITTSSTNALFSISSDSLNSGEEWYLSQLFLVKESAFTTQINP

SEQ ID NO: 40 - protein, 724 aa, Bacillus thuringiensis jegathesan 367
MQNNNFNTTEINNMINFPMYNGRLEPSLAPALIAVAPIAKYLATALAKWAVKQGFAKLKSEIFPGNTPATMDKVRIEVQTLLDQRLQDDRVKILEGEYKGIIDVSKVFTDYVNQSKFETGTANRLFFDTSNQLISRLPQFEIAGYEGVSISLFTQMCTFHLGLLKDGILAGSDWGFAPADKDALICQFNRFVNEYNTRLMVLYSKEFGRLLAKNLNEALNFRNMCSLYVFPFSEAWSLLRYEGTKLENTLSLWNFVGESINNISPNDWKGALYKLLMGAPNQRLNNVKFNYSYFSDTQATIHRENIHGVLPTYNGGPTITGWIGNGRFSGLSFPCSNELEITKIKQEITYNDKGGNFNSIVPAATRNEILTATVPTSADPFFKTADINWKYFSPGLYSGWNIKFDDTVTLKSRVPSIIPSNILKYDDYYIRAVSACPKGVSLAYNHDFLTLTYNKLEYDAPTTQNIIVGFSPDNTKSFYRSNSHYLSTTDDAYVIPALQFSTVSDRSFLEDTPDQATDGSIKFTDTVLGNEAKYSIRLNTGFNTATRYRLIIRFKAPARLAAGIRVRSQNSGNNKLLGGIPVEGNSGWIDYITDSFTFDDLGITTSSTNAFFSIDSDGVNASQQWYLSKLILVKESSFTTQIPLKPYVIVRCPDTFFVSNNSSSTYEQGYNNNYNQNSSSMYDQGYNNSYNPNSGCTCNQDYNNSYNQNSGCTCNQGYNNNYPK

SEQ ID NO: 41 - protein, 750 aa, Bacillus thuringiensis medellin
MENNSFNVLANNNMSSFPLFNSKIEPSIAPALIAVAPIAKYLATALAKWALKQGFAKLKSEIFPGNETATMEKVRLEVQTILNQTLQTDRVATLKAEYEGFIHLGKVFTDYVSQSTFTPATAKTHFLNMSNLLIQRLPQFEIAGYEGVSISLFTQMCTLHLGLLKDGILAGSDWGFTPEDKDSLICQFNRYVNEYNTRMMGLYSIEFGRLLAKNLNEALNFRNMCSLYVFPFSEAWYLLRYEGTKLENTLSLWNFVGEDIGGILHNDWKGALYKLLMGATNQRLANVRFNYSYFSDTQGTIHRENILGAHPTYNGEQTPTGWIGNGRLGRFSAPYSNELEITKVEQEITYNNKGDHSNSIVPANTRNEILTATVPITADPFFKTADINWRYFSQGLYYGWNIKFDDRVILNSRVPGGIPSNRLEYDGYYIRAVSACPRNVPLSYNHNYLTLTYNRLEYDAPTTQNIIVGFSPNNTKSFYARNSHYLSATNDAYVIPALQFATVSDRSFLEDTPDQATDGSIKFTETVLGNEAKYSIRLNTGFNTATRYRLVIRFKATARLAAGIRVRSQNSGNNRLLGGIPVEGNSGWVDYITDSFTFNDLGITTASTNAFFSIDSDGVNASQQWYLSKLILVKDFVNNSGFRNQVPLAPYVIARCPNTFFVSNNTSSGYEQGYNDNYNQNTSSGYEQGYNDNYNQNTSSGYEQGYNDNYNQNTSSGYEQGYNDNYNQNTSSGYEQGYNDNYNQNTSSGV

SEQ ID NO: 42 - protein, 792 aa, Bacillus thuringiensis K34
MENNSFNVLANNNMSSFPLFNSKIEPSIAPALIAVAPIAKYLATALAKWALKQGFAKLKSEIFPGNTPATMEKVRLEVQTLLNQTLQADRVAILNAEYQGFINLGKIFTDYVSQSTFTPATAKTHFLSMSNQLIQRLPQFEIAGYEGVSISLFTQMCTLHLGLLKDGILAGSDWGFTPEDKDSLICQFNRYVNEYNTRMMGLYSIEFGRLLAKNLNEALNFRNMCSLYVFPFSEAWYLLRYEGTKLENTLSLWNFVGEDIGGILHNDWKGALYKLLMGATNQRLANVRFNYSYFSDTQGTIHRENILGAHPTYNGEQTPTGWIGNGRLGRFSAPYSNELEITKVEQEITYNNKGDHSNSIVPANTRNEILTATVPITADPFFKTADINWRYFSQGLYYGWNIKFDDKVILNSRVPGGIPSNRLEYDGYYIRAVSACPRNVPLSYNHNYLTLTYNRLEYDAPTTQNIIVGFSPNNTKSFYARNSHYLSATDDAYVIPALQFATVSDRSFLEDTPDQATDGSIKFTETVLGNEAKYSIRLNTGFNTATRYRLVIRFKAPARLAAGIRVRSQNSGNNRLLGGIPVEGNSGWVDYITDSFTFNDLGITTASTNAFFSIDSDGVNASQQWYLSKLILVKDFVNNSGFRNQVPLAPYVITRCPNTFFVSNNTSSGYEQGYNDNYNQNTSSGYEQGYNDNYNQNTSSGYEQGYNDNYNQNTSSGYEQGYNDNYNQNTSSEYEQGYNDNYNQNTSSGYEQGYNDNYNQNTSSGYEQGYIDNYRPNTECKCGRRHNNYDHK

SEQ ID NO: 43 - protein, 1257 aa, Bacillus thuringiensis PS33F2
MATLNEVYPVNYNVLSSDAFQQLDTTGFKSKYDEMIKAFEKKWKKGAKGKDLLDVAWTYITTGEIDPLNVIKGVLSVLTLIPEVGTVASAASTIVSFIWPKIFGDKPNAKNIFEELKPQIEALIQQDITNYQDAINQKKFDSLQKTINLYTVAIDNNDYVTAKTQLENLNSILTSDISIFIPEGYETGGLPYYAMVANAHILLLRDAIVNAEKLGFSDKEVDTHKKYIKMTIHNHTEAVIKAFLNGLDKFKSLDVNSYNKKANYIKGMTEMVLDLVALWPTFDPDHYQKEVEIEFTRTISSPIYQPVPKNMQNTSSSIVPSDLFHYQGDLVKLEFSTRTDNDGLAKIFTGIRNTFYKSPNTHETYHVDFSYNTQSSGNISRGSSNPIPIDLNNPIISTCIRNSFYKAIAGSSVLVNFKDGTQGYAFAQAPTGGAWDHSFIESDGAPEGHKLNYIYTSPGDTLRDFINVYTLISTPTINELSTEKIKGFPAEKGYIKNQGIMKYYGKPEYINGAQPVNLENQQTLIFEFHASKTAQYTIRIRYASTQGTKGYFRLDNQELQTLNIPTSHNGYVTGNIGENYDLYTIGSYTITEGNHTLQIQHNDKNGMVLDRIEFVPKDSLQDSPQDSPPEVHESTIIFDKSSPTIWSSNKHSYSHIHLEGSYTSQGSYPHNLLINLFHPTDPNRNHTIHVNNGDMNVDYGKDSVADGLNFNKITATIPSDAWYSGTITSMHLFNDNNFKTITPKFELSNELENITTQVNALFASSAQDTLASNVSDYWIEQVVMKVDALSDEVFGKEKKALRKLVNQAKRLSKIRNLLIGGNFDNLVAWYMGKDVVKESDHELFKSDHVLLPPPTFHPSYIFQKVEESKLKPNTRYTISGFIAHGEDVELVVSRYGQEIQKVMQVPYEEALPLTSESNSSCCVPNLNINETLADPHFFSYSIDVGSLEMEANPGIEFGLRIVKPTGMARVSNLEIREDRPLTAKEIRQVQRAARDWKQNYEQERTEITAIIQPVLNQINALYENEDWNGSIRSNVSYHDLEQIMLPTLLKTEEINCNYDHPAFLLKVYHWFMTDRIGEHGTILARFQEALDRAYTQLESRNLLHNGHFTTDTANWTIEGDAHHTILEDGRRVLRLPDWSSNATQTIEIEDFDLDQEYQLLIHAKGKGSITLQHGEENEYVETHTHHTNDFITSQNIPFTFKGNQIEVHITSEDGEFLIDHITVIEVSKTDTNTNIIENSPINTSMNSNVRVDIPRSL

SEQ ID NO: 44 - protein, 803 aa, Bacillus thuringiensis PS63B
MTCQLQAQPLIPYNVLAGVPTSNTGSPIGNAGNQFDQFEQTVKELKEAWEAFQKNGSFSLAALEKGFDAAIGGGSFDYLGLVQAGLGLVGTLGAAIPGVSVAVPLISMLVGVFWPKGTNNQENLITVIDKEVQRILDEKLSDQLIKKLNADLNAFTDLVTRLEEVIIDATFENHKPVLQVSKSNYMKVDSAYFSTGGILTLGMSDFLTDTYSKLTFPLYVLGATMKLSAYHSYIQFGNTWLNKVYDLSSDEGKTMSQALARAKQHMRQDIAFYTSQALNMFTGNLPSLSSNKYAINDYNVYTRAMVLNGLDIVATWPTLYPDDYSSQIKLEKTRVIFSDMVGQSESRDGSVTIKNIFDNTDSHQHGSIGLNSISYFPDELQKAQLRMYDYNHKPYCTDCFCWPYGVILNYNKNTFRYGDNDPGLSGDVQLPAPMSVVNAQTQTAQYTDGENIWTDTGRSWLCTLRGYCTTNCFPGRGCYNNSTGYGESCNQSLPGQKIHALYPFTQTNVLGQSGKLGLLASHIPYDLSPNNTIGDKDTDSTNIVAKGIPVEKGYASSGQKVEIIREWINGANVVQLSPGQSWGMDFTNSTGGQYMVRCRYASTNDTPIFFNLVYDGGSNPIYNQMTFPATKETPAHDSVDNKILGIKGINGNYSLMNVKDSVELPSGKFHVFFTNNGSSAIYLDRLEFVPLDQPAAPTQSTQPINYPITSRLPHRSGEPPAIIWEKSGNVRGNQLTISAQGVPENSQIYLSVGGDRQILDRSNGFKLVNYSPTYSFTNIQASSSNLVDITSGTITGQVQVSNL

SEQ ID NO: 45 - protein, 1186 aa, Bacillus thuringiensis sotto PS80JJ1
MDCNLQSQQNIPYNVLAIPVSNVNALVDTAGDLKKAWEEFQKTGSFSLTALQQGFSASQGGAFNYLTLLQSGISLAGSFVPGGTFVAPIVNMVIGWLWPHKNKTADTENLIKLIDEEIQKQLNKALLDQDRNNWTSFLESIFDTSATVSNAIIDAQWSGTVDTTNRQQKTPTTSDYLNVVGKFDSADSSIITNENQIMNGNFDVAAAPYFVIGATLRLSLYQSYIKFCNSWIDAVGFSTNDANTQKANLARTKLTMRTTINEYTQRVMKVFKDSKNMPTIGTNKFSVDAYNVYVKGMTLNVLDMVAIWSSLYPNDYTSQTAIEQTRVTFSNMVGQEEGTDGTLKIYNTFDSLSYQHSLIPNNNVNLISYYTDELQNLELAVYTPKGGSGYAYPYGFILNYANSNYKYGDNDPTGKPLNKQDGPIQQINAATQNSKYLDGETINGIGASLPGYCTTGCSATEQPFSCTSTANSYKASCNPSDTNQKINALYAFTQTNVKGSTGKLGVLASLVPYDLNPKNVFGELDSDTNNVILKGIPAEKGYFPNNARPTVVKEWINGASAVPFYSGNTLFMTATNLTATQYKIRIRYANPNSDTQIGVLITQNGSQISNSNLTLYSTTDSSMSSNLPQNVYVTGENGNYTLLDLYSTTNVLSTGDITLKLTGGNQKIFIDRIEFIPTMPVPAPTNNTNNNNGDNGNNNPPHHGCAIAGTQQLCSGPPKFEQVSDLEKITTQVYMLFKSSSYEELALKVSSYQINQVALKVMALSDEKFCEEKRLLRKLVNKANQLLEARNLLVGGNFETTQNWVLGTNAYINYDSFLFNGNYLSLQPASGFFTSYAYQKIDESTLKPYTRYKVSGFIGQSNQVELIISRYGKEIDKILNVPYAGPLPITADASITCCAPEIDQCDGGQSDSHFFNYSIDVGALHPELNPGIEIGLKIVQSNGYITISNLEIIEERPLTEMEIQAVNRKDQKWKREKLLECASVSELLQPIINQIDSLFKDANWYNDILPHVTYQTLKNIIVPDLPKLKHWFIDHLPGEYHEIEQKMKEALKHAFTQLDEKNLIHNGHFATNLIDWQVEGDARMKVLENNALALQLSNWDSSVSQSIDILEFDEDKAYKLRVYAQGSGTIQFGNCEDEAIQFNTNSFVYKEKIIYFDTPSINLHIQSEGSEFVVSSIDLVELSDDE

SEQ ID NO: 46 - protein, 340 aa, Bacillus thuringiensis thompsoni
MAIMNDIAQDAARAWDIIAGPFIRPGTTPTNRQLFNYQIGNIEVEPGNLNFSVVPELDFSVSQDLFNNTSVQQSQTASFNESRTETTSTAVTHGVKSGVTVSASAKFNAKILVKSIEQTITTTVSTEYNFSSTTTRTNTVTRGWSIAQPVLVPPHSRVTATLQIYKGDFTVPVLLSLRVYGQTGTLAGNPSFPSLYAATYENTLLGRIREHIAPPALFRASNAYISNGVQAIWRGTATTRVSQGLYSVVRIDERPLAGYSGETRTYYLPVTLSNSSQILTPGSLGSEIPIINPVPNASCKKENSPIIIHHDREKHRERDYDKEHICHDQAEKYERDYDKE

SEQ ID NO: 47 - protein, 613 aa, Clostridium bifermentans malaysia CH18
MNTNIFSTHLEFSKGVASVFKVIDTIHNISKNNNFNNILTQDFIIDTILSILWEDPNENEIFSSMIEDGETITNKNLSAQTKEGLLLNSNSFGLKFKYYNNAFRSWIDNYNPTSIDDVVYRFKDVNSICENNINEFKVKNYEVTVLPIYMQIANLHLLLLRDGMIYGDAWNLYRELGFSDQDSFYNHVLDKTKFYINDCLNYYNTGLSNLKLDPNNSWIDITRYCRFMTFYILDMISICPIYDTKVYDKPINMQTLTRKVYSDPVNFIDENIPISEYEKMYNISPELFSTLFSISFYTNKSGNKFLNGHVNRHVGTDLNYNGLRETHYGNYGSNYEVESMAFDDIKAYSNNYFNNTQNNNPTSVKSIKFLITKNNDEWIYGEPDSSNIDFTRNIQGYLSNLNNESYTHSLSDMILANNDKIQINIDTPHSYSYSWIYKGIEDTNYISDKLINQIPLVKEVKLKSRHYSEISVIKGPGFTGGDLILSKVHKPANQIPAQYMKNKITIPIKTKFPAGSQDFKVRLCYASNHDIGLIRLIAGSKYITTNIQQTFNTTENNPSLIYDDFKYFNFNETLSITSSGIDELYLEFYYSYTDGNFEDFPKLSIPYTRNYSC

SEQ ID NO: 48 - protein, 618 aa, Clostridium bifermentans malaysia CH18
MNNKKIEQNKIVEYNSNLDIQPRELNTLNGLVFTGATVSIILPLIGTTAVVPVVGGVIGIIAALLPVIWPAGTSSNDNLFDAVMKDTEMIMDEKISEYVVNDAMTRLESLYNILDYYRLSKDFWEKNKDDPLAIAELKERFSKLHSQFIESMAYFKRANYEVLLLPAYANAANLHLLLLREGLLLNKVIDNFITEGLHYEEFKTKRSTYIAHCSTWYNKGLENIKNKTRDFNKINKYDAYMNLSVLDIISLFLSYDPYQYDKATKLQTLTRTVFSDPLQRAPRDLYISPKEETLFKNLKGLRAFFAEGDLVLTGFRNYFRNTYINDQIIEGDLFGYTTNNERYKLFTDSKIYKVTVFIDNVALAIVKLIFHDTDNKEWDFSKTDITDINKYRKEEVYLNLLSNNEIQKEPSHYLYKMHHYGDNYNDSYLFQWIHQSISPENYLFDKDKDDNYIITQIPAIKASELSNLGELSLQAIKGPRFTGGNVILSSVSKIDNNDPLYGGTIKIPLLTAFNNTSKFKIRIYYAANHNYNHDYIGALLTINSQHVANFKFKQTFSGEDYSNLSYNNYQFDYLVQTVAFPQNTSDVTLNLQFFYDPKFLNDYKQIVIIDKIEFIPEN

SEQ ID NO: 49 - protein, 706 aa, Paenibacillus popilliae
MNNNFNGGNNTGNNFTGNTLSNGICTKKNMKGTLSRTAIFSDGISDDLICCLDPIYNNNDNNNDAICDELGLTPIDNNTICSTDFTPINVMRTDPFRKKSTQELTREWTEWKENSPSLFTPAIVGVVTSFLLQSLKKQATSFLLKTLTDLLFPNNSSLTMEEILRATEQYVQERLDTDTANRVSQELVGLKNNLTTFNDQVEDFLQNRVGISPLAIIDSINTMQQLFVNRLPQFQVSGYQVLLLPLFAQAATLHLTFLRDVIINADEWNIPTAQLNTYTRYFKEYIAEYSNYALSTYDDGFRTRFYPRNTLEDMLQFKTFMTLNALDLVSIWSLLKYVNLYVSTSANLYNIGDNKVNEGAYPISYGPFFNSYIQTKSNYVLSGVSGIGARFTYSTVLGRYLHDDLKNIITTYVGGTQGPNIGVQLSTTELDELKKQQQATRDSLVDFQFFTLNCMLPNPITAPYFATSLYESRYSSIGGYLRKDVFKSEDSTCGLGNPGAWTSYPDYYITNISATVQINGENTDTTPLYFKENRPITSTRGVNKVIAVYNRKANIAGTNQNGTMIHQAPPDGTGFTVSPLHPSANTITSYIKENYGNSGDSLHLKGQGYLHYMLSGNGQDRYRLVLRLSGAANQIKLQSPTTSIYAFDTSTNNEGITDNGSKFKDFAFSTPFVIPEQKEIVLYFEGVGSLDLMNLIFLPADDTPLY

SEQ ID NO: 50 - protein, 675 aa, Paenibacillus popilliae
MNNNGNALSRTALTPTNNKVISGDLVTNGLPPIDNNIICSNGFMPINVTRKNPFRKRTTQEFIREWTEWKENSPSLFTAPIVGVVTSTLLEALKKQVQSRLLLLMTNLLFPNNSTSTMEEILRATEQYVQEQLDTVTWNRVSQELEGLKNNLRTFNDQIDDFLQNRVEISPTAMIDSINTMQQVFVNRLPQFQLSDYQLLLLPLFAQGATLHLTFIRDIIINAGEWNIPEAQLNTCKRYLKQYVAQYSNYALSTYEGAFRARFYPRATLENMLQFKTFMTLNVLDLVSIWSLLKYMNLYISTSANLYNIGDNKVNEGEYSISYWPFFNSYIQTKSNYVLSGVSGYAIRWYYLNTFFGEYIQDNLYNIIASYVGGVNGPKIGVQLSTTELDKQIKQQARAGMPTGLDDLSFNCTLRNPTTVPYFACNFQELTSSGTAGTGGFIRSDVFRSEDNICGLGTGYASAWTSYPDYYITNISATVQVDGINIDITPLCFGEDRAITSTHGVNKVIAVYNRKANIAGTNQNGTMIHQAPNDGTGFTVSPLHLASFTHPSEAHIQENYGNSGDSLRLTGPTTAITYMLSGDGRTIYKLVLRVSGVITRITAKVRGNSIGYLEYINTVDNNQGITDNGSKFQDFEFRPTITIDAQTPIVLEFSATSNFDLMNLIFIPYYDTPIY

SEQ ID NO: 51 - protein, 695 aa, Paenibacillus popilliae
MNNYFIGKVLSGHHINNNGNGNTLSRTALTPTNNNVNRGDLVTNGLTPIDNNFIGSNGFIPRNVTRKDPFRKRTTQEFIREWTEWKEKSASLFTAPIVGVITSTLLEALKKLVAGRVLMSLTNLLFPNNSTSTMEEILRATEQYIQEQLDTVTWNRVSQELEGLKNDLRTFNDQIDDFLQNRVGISPLAIIDSINTMQQLFVNRLPQFQVSDDQVLLLPLFAQAVTLHLTFVRDIIINADEWNIPEAQLNTYKRYLKQYVAQYSNYALSTYEEAFRARFYPRNTVENMLEFKTFMTLNVLDLVSMWSLLKYVNLYVSTSANLYNIGDNKVNEGEYSISYWPFFNTYIQTKSNYVLSGVSGYAMRWSYTNPFFGEYIQDHLYNITASYIGGVNGPQIGQQLSTTELDQLVQQQARADIPVDFTQIPINCTLRNPLEVPYYATRFNELTSLGTAGVGGFVRSDVFISNDSVCGLGTNYSSGQTFYPDYYITNISATVQVNGTNTDISPLYFGENRAITSTNGVNKVIAIYNRKTNYDDFTNIRGTIVHEAPTDSTGFTISPLHLDTVNINSYLYIQENYGNNGDSLRVINRAIIKYRLSAARSVIYRLVLRVSGTASSIVAIYENYPVGSANQINTGTDNEGVIDNDSKFIDLIFNTPFSVSGTARELQLQVSGATTSSPLDIMNIILIPINDVPLY

SEQ ID NO: 52 - protein, 648 aa, Bacillus thuringiensis jegathesan 367
MHYYGNRNEYDILNASSNDSNMSNTYPRYPLANPQQDLMQNTNYKDWLNVCEGYHIENPREASVRAGLGKGLGIVSTIVGFFGGSIILDTIGLFYQISELLWPEDDTQQYTWQDIMNHVEDLIDKRITEVIRGNAIRTLADLQGKVDDYNNWLKKWKDDPKSTGNLSTLVTKFTALDSDFNGAIRTVNNQGSPGYELLLLPVYAQIANLHLLLLRDAQIYGDKWWSARANARDNYYQIQLEKTKEYTEYCINWYNKGLNDFRTAGQWVNFNRYRREMTLTVLDIISMFPIYDARLYPTEVKTELTREIYSDVINGEIYGLMTPYFSFEKAESLYTRAPHLFTWLKGFRFVTNSISYWTFLSGGQNKYSYTNNSSINEGSFRGQDTDYGGTSSTINIPSNSYVYNLWTENYEYIYPWGDPVNITKMNFSVTDNNSSKELIYGAHRTNKPVVRTDFDFLTNKEGTELAKYNDYNHILSYMLINGETFGQKRHGYSFAFTHSSVDPNNTIAANKITQIPVVKASSINGSISIEKGPGFTGGDLVKMRADSGLTMRFKAELLDKKYRVRIRYKCNYSSKLILRKWKGEGYIQQQIHNISPTYGAFSYLESFTITTTENIFDLTMEVTYPYGRQFVEDIPSLILDKIEFLPTN

SEQ ID NO: 53 - protein, 682 aa, Bacillus thuringiensis higo
MNSYQNKNEYEILDAKRNTCHMSNCYPKYPLANDPQMYLRNTHYKDWINMCEEASYASSGPSQLFKVGGSIVAKILGMIPEVGPLLSWMVSLFWPTIEEKNTVWEDMIKYVANLLKQELTNDTLNRATSNLSGLNESLNIYNRALAAWKQNKNNFASGELIRSYINDLHILFTRDIQSDFSLGGYETVLLPSYASAANLHLLLLRDVAIYGKELGYPSTDVEFYYNEQKYYTEKYSNYCVNTYKSGLESKKQIGWSDFNRYRREMTLSVLDIVALFPLYDTGLYPSKDGKIHVKAELTREIYSDVINDHVYGLMVPYISFEHAESLYTRRPHAFTWLKGFRFVTNSINSWTFLSGGENRYFLTHGEGTIYNGPFLGQDTEYGGTSSYIDISNNSSIYNLWTKNYEWIYPWTDPVNITKINFSITDNSNSSESIYGAERMNKPTVRTDFNFLLNRAGNGPTTYNDYNHILSYMLINGETFGQKRHGYSFAFTHSSVDRYNTIVPDKIVQIPAVKTNLVGANIIKGPGHTGGDLLKLEYERFLSLRIKLIASMTFRIRIRYASNISGQMMINIGYQNPTYFNIIPTTSRDYTELKFEDFQLVDTSYIYSGGPSISSNTLWLDNFSNGPVIIDKIEFIPLGITLNQAQGYDTYDQNANGMYHQNYSNSGYNYNQEYNTYYQSYNN

SEQ ID NO: 54 - protein, 1176 aa, Bacillus thuringiensis kurstaki HD1
MDNNPNINECIPYNCLSNPEVEVLGGERIETGYTPIDISLSLTQFLLSEFVPGAGFVLGLVDIIWGIFGPSQWDAFPVQIEQLINQRIEEFARNQAISRLEGLSNLYQIYAESFREWEADPTNPALREEMRIQFNDMNSALTTAIPLLAVQNYQVPLLSVYVQAANLHLSVLRDVSVFGQRWGFDAATINSRYNDLTRLIGNYTDYAVRWYNTGLERVWGPDSRDWVRYNQFRRELTLTVLDIVALFSNYDSRRYPIRTVSQLTREIYTNPVLENFDGSFRGMAQRIEQNIRQPHLMDILNSITIYTDVHRGFNYWSGHQITASPVGFSGPEFAFPLFGNAGNAAPPVLVSLTGLGIFRTLSSPLYRRIILGSGPNNQELFVLDGTEFSFASLTTNLPSTIYRQRGTVDSLDVIPPQDNSVPPRAGFSHRLSHVTMLSQAAGAVYTLRAPTFSWQHRSAEFNNIIPSSQITQIPLTKSTNLGSGTSVVKGPGFTGGDILRRTSPGQISTLRVNITAPLSQRYRVRIRYASTTNLQFHTSIDGRPINQGNFSATMSSGSNLQSGSFRTVGFTTPFNFSNGSSVFTLSAHVFNSGNEVYIDRIEFVPAEVTFEAEYDLERAQKAVNELFTSSNQIGLKTDVTDYHIDQVSNLVECLSDEFCLDEKQELSEKVKHAKRLSDERNLLQDPNFRGINRQLDRGWRGSTDITIQGGDDVFKENYVTLLGTFDECYPTYLYQKIDESKLKAYTRYQLRGYIEDSQDLEIYLIRYNAKHETVNVPGTGSLWPLSAQSPIGKCGEPNRCAPHLEWNPDLDCSCRDGEKCAHHSHHFSLDIDVGCTDLNEDLGVWVIFKIKTQDGHARLGNLEFLEEKPLVGEALARVKRAEKKWRDKREKLEWETNIVYKEAKESVDALFVNSQYDQLQADTNIAMIHAADKRVHSIREAYLPELSVIPGVNAAIFEELEGRIFTAFSLYDARNVIKNGDFNNGLSCWNVKGHVDVEEQNNQRSVLVLPEWEAEVSQEVRVCPGRGYILRVTAYKEGYGEGCVTIHEIENNTDELKFSNCVEEEIYPNNTVTCNDYTVNQEEYGGAYTSRNRGYNEAPSVPADYASVYEEKSYTDGRRENPCEFNRGYRDYTPLPVGYVTKELEYFPETDKVWIEIGETEGTFIVDSVELLLMEE

SEQ ID NO: 55 - protein, 1176 aa, Bacillus thuringiensis kurstaki HD-1-02
MDNNPNINECIPYNCLSNPEVEVLGGGRIETGYTPIDISLSLTQFLLSEFVPGAGFVLGLVDIIWGIFGPSQWDTFLVQIEQLINQRIEEFARNQAISRLEGLSNLYQIYAESFREWEADPTNPALREEMRIQFNDMNSALTTAIPLLAVQNYQVPLLSVYVQAANLHLSVLRDVSVFGQRWGFDAATINSRYNDLTRLIGNYTDYAVRWYNTGLERVWGPDSRDWVRYNQFRRELTLTVLDIVALFSNYDSRRYPIRTVSQLTREIYTNPVLENFDGSFRGMAQRIEQNIRQPHLMDILNSITIYTDVHRGFNYWSGHQITASPVGFSGPEFAFPLFGNAGNAAPPVLVSLTGLGIFRTLSSPLYRRIILGSGPNNQELFVLDGTEFSFASLTTNLPSTIYRQRGTVDSLDVIPPQDNSVPPRAGFSHRLGHVTMLSQAAGAVYTLRAPTFSWQHRSAEFNNIIPSSQITQIPLTKSTNLGSGTSVVKGPGFTGGDILRRTSPGQISTLRVNITAPLSQRYRVRIRYASTTNLQFHTSIDGRPINQGNFSATMSSGSNLQSGSFRTVGFTTPFNFSNGSSVFTLSAHVFNSGNEVYIDRIEFVPAEVTFEAEYDLERAQKAVNELFTSSNQIGLKTDVTDYHIDQVSNLVECLSDEFCLDEKQELSEKVKHAKRLSDERNLLQDPNFRGINRQLDRGWRGSTDITIQGGDDVFKENYVTLLGTFDECYPTYLYQKIDESKLKAYTRYQLRGYIEDSQDLEIYLIRYNAKHETVNVPGTGSLWPLSAQSPIGKCGEPNRCAPHLEWNPDLDCSCRDGEKCAHHSHHFSLDIDVGCTDLNEDLGVWVIFKIKTQDGHARLGNLEFLEEKPLVGEALARVKIAEKKWRDKREKLEWETNIVYKEAKESVDALFVNSQYDQLQADTNIAMIHAADKRVHSIREAYLPELSVIPGVNAAIFEELEGRIFTAFSLYDARNVIKNGDFNNGLSCWNVKGHVDVEEQNNQRSVLVVPEWEAEVSQEVRVCPGRGYILRVTAYKEGYGEGCVTIHEIENNTDELKFSNCVEEEIYSNNTVTCNDYTVNQEEYGGAYTSRNRGYNEAPSVPADYASVYEEKSYTDGRRENPCEFNRGYRDYTPLPVGYVTKELEYFPETDKVWIEIGETEGTFIVDSVELLLMEE

SEQ ID NO: 56 - protein, 1176 aa, Bacillus thuringiensis kurstaki
MDNNPNINECIPYNCLSNPEVEVLGGERIETGYTPIDISLSLTQFLLSEFVPGAGFVLGLVDIIWGIFGPSQWDAFLVQIEQLINQRIEEFARNQAISRLEGLSNLYQIYAESFREWEADPTNPALREEMRIQFNDMNSALTTAIPLLAVQNYQVPLLSVYVQAANLHLSVLRDVSVFGQRWGFDAATINSRYNDLTRLIGNYTDYAVRWYNTGLERVWGPDSRDWVRYNQFRRELTLTVLDIVALFSNYDSRRYPIRTVSQLTREIYTNPVLENFDGSFRGMAQRIEQNIRQPHLMDILNSITIYTDVHRGFNYWSGHQITASPVGFSGPEFAFPLFGNAGNAAPPVLVSLTGLGIFRTLSSPLYRRIILGSGPNNQELFVLDGTEFSFASLTTNLPSTIYRQRGTVDSLDVIPPQDNSVPPRAGFSHRLSHVTMLSQAAGAVYTLRAPTFSWQHRSAEFNNIIPSSQITQIPLTKSTNLGSGTSVVKGPGFTGGDILRRTSPGQISTLRVNITAPLSQRYRVRIRYASTTNLQFHTSIDGRPINQGNFSATMSSGSNLQSGSFRTVGFTTPFNFSNGSSVFTLSAHVFNSGNEVYIDRIEFVPAEVTFEAEYDLERAQKAVNELFTSSNQIGLKTDVTDYHIDQVSNLVECLSDEFCLDEKQELSEKVKHAKRLSDERNLLQDPNFRGINRQLDRGWRGSTDITIQGGDDVFKENYVTLLGTFDECYPTYLYQKIDESKLKAYTRYQLRGYIEDSQDLEIYLIRYNAKHETVNVPGTGSLWPLSAQSPIGKCGEPNRCAPHLEWNPDLDCSCRDGEKCAHHSHHFSLDIDVGCTDLNEDLGVWVIFKIKTQDGHARLGNLEFLEEKPLVGEALARVKRAEKKWRDKREKLEWETNIVYKEAKESVDALFVNSQYDQLQADTNIAMIHAADKRVHSIREAYLPELSVIPGVNAAIFEELEGRIFTAFSLYDARNVIKNGDFNNGLSCWNVKGHVDVEEQNNQRSVLVVPEWEAEVSQEVRVCPGRGYILRVTAYKEGYGEGCVTIHEIENNTDELKFSNCVEEEIYPNNTVTCNDYTVNQEEYGGAYTSRNRGYNEAPSVPADYASVYEEKSYTDGRRENPCEFNRGYRDYTPLPVGYVTKELEYFPETDKVWIEIGETEGTFIVDSVELLLMEE

SEQ ID NO: 57 - protein, 1176 aa, Bacillus thuringiensis Ly30
MDNNPNINECIPYNCLSNPEVEVLGGERIETGYTPIDISLSLTQFLLSEFVPGAGFVLGLVDIIWGIFGPSQWDAFLVQIEQLINQRIEEFARNQAISRLEGLSNLYQIYAESFREWEADPTNPALREEMRIQFNDMNSALTTAIPLFAVQNYQVPLLSVYVQAANLHLSVLRDVSVFGQRWGFDAATINSRYNDLTRLIGNYTDYAVRWYNTGLERVWGPDSRDWVRYNQFRRELTLTVLDIVALFSNYDSRRYPIRTVSQLTREIYTNPVLENFDGSFRGMAQRIEQNIRQPHLMDILNSITIYTDVHRGFNYWSGHQITASPVGFSGPEFAFPLFGNAGNAAPPVLVSLTGLGIFRTLSSPLYRRIILGSGPNNQELFVLDGTEFSFASLTTNLPSTIYRQRGTVDSLDVIPPQDNSVPPRAGFSHRLSHVTMLSQAAGAVYTLRAPTFSWQHRSAEFNNIIPSSQITQIPLTKSTNLGSGTSVVKGPGFTGGDILRRTSPGQISTLRVNITAPLSQRYRVRIRYASTTNLQFHTSIDGRPINQGNFSATMSSGSNLQSGSFRTVGFTTPFNFSNGSSVFTLSAHVFNSGNEVYIDRIEFVPAEVTFEAEYDLERAQKAVNELFTSSNQIGLKTDVTDYHIDQVSNLVECLSDEFCLDEKQELSEKVKHAKRLSDERNLLQDPNFRGINRQLDRGWRGSTDITIQGGDDVFKENYVTLLGTFDECYPTYLYQKIDESKLKAYTRYQLRGYIEDSQDLEIYLIRYNAKHETVNVPGTGSLWPLSAQSPIGKCGEPNRCAPHLEWNPDLDCSCRDGEKCAHHSHHFSLDIDVGCTDLNEDLGVWVIFKIKTQDGHARLGNLEFLEEKPLVGEALARVKRAEKKWRDKREKLEWETNIVYKEAKESVDALFVNSQYDQLQADTNIAMIHAADKRVHSIREAYLPELSVIPGVNAAIFEELEGRIFTAFSLYDARNVIKNGDFNNGLSCWNVKGHVDVEEQNNQRSVLVVPEWEAEVSQEVRVCPGRGYILRVTAYKEGYGEGCVTIHEIENNTDELKFSNCVEEEIYPNNTVTCNDYTVNQEEYGGAYTSRNRGYNEAPSVPADYASVYEEKSYTDGRRENPCEFNRGYRDYTPLPVGYVTKELEYFPETDKVWIEIGETEGTFIVDSVELLLMEE

SEQ ID NO: 58 - protein, 1180 aa, Bacillus thuringiensis sotto
MDNNPNINECIPYNCLSNPEVEVLGGERIETGYTPIDISLSLTQFLLSEFVPGAGFVLGLVDIIWGIFGPSQWDAFLVQIEQLINQRIEEFARNQAISRLEGLSNLYQIYAESFREWEADPTNPALREEMRIQFNDMNSALTTAIPLFAVQNYQVPLLSVYVQAANLHLSVLRDVSVFGQRWGFDAATINSRYNDLTRLIGNYTDYAVRWYNTGLERVWGPDSRDWVRYNQFRRELTLTVLDIVALFSNYDSRRYPIRTVSQLTREIYTNPVLENFDGSFRGMAQRIEQNIRQPHLMDILNRITIYTDVHRGFNYWSGHQITASPVGFSGPEFAFPLFGNAGNAAPPVLVSLTGLGIFRTLSSPLYRRIILGSGPNNQELFVLDGTEFSFASLTTNLPSTIYRQRGTVDSLDVIPPQDNSVPPRAGFSHRLSHVTMLSQAAGAVYTLRAPTFSWQHRSAEFNNIIPSSQITQIPLTKSTNLGSGTSVVKGPGFTGGDILRRTSPGQISTLRVNITAPLSQRYRVRIRYASTTNLQFHTSIDGRPINQGNFSATMSSGSNLQSGSFRTVGFTTPFNFSNGSSVFTLSAHVFNSGNEVYIDRIEFVPAEVTFEAEYDLERAQKAVNELFTSSNQIGLKTDVTDYHIDQVSNLVECLSDEFCLDEKQELSEKVKHAKRLSDERNLLQDPNFRGINRQLDRGWRGSTDITIQGGDDVFKENYVTLLGTFDECYPTYLYQKIDESKLKAYTRYQLRGYIEDSQDLEIYLIRYNAKHETVNVPGTGSLWPLSAQSPIGKCGEPNRCAPHLEWNPDLDCSCRDGEKCAHHSHHFSLDIDVGCTDLNEDLGVWVIFKIKTQDGHARLGNLEFLEEKPLVGEALARVKRAEKKWRDKREKLEWETNIVYKEAKESVDALFVNSQYDRLQADTNIAMIHAADKRVHSIREAYLPELSVIPGVNAAIFEELEGRIFTAFSLYDARNVIKNGDFNNGLSCWNVKGHVDVEEQNNHRSVLVVPEWEAEVSQEVRVCPGRGYILRVTAYKEGYGEGCVTIHEIENNTDELKFSNCVEEEVYPNNTVTCNDYTATQEEYEGTYTSRNRGYDGAYESNSSVPADYASAYEEKAYTDGRRDNPCESNRGYGDYTPLPAGYVTKELEYFPETDKVWIEIGETEGTFIVDSVELLLMEE

SEQ ID NO: 59 - protein, 1183 aa, Bacillus thuringiensis
MDNNPNINECIPYNCLSNPEVEVLGGERIETGYTPIDISLSLTQFLLSEFVPGAGFVLGLVDIIWGIFGPSQWDAFLVQIEQLINQRIEEFARNQAISRLEGLSNLYQIYAESFREWEADPTNPALREEMRIQFNDMNSALTTAIPLLAVQNYQVPLLSVYVQAANLHLSVLRDVSVFGQRWGFDAATINSRYNDLTRLIGNYTDYAVRWYNTGLERVWGPDSRDWVRYNQFRRELTLTVLDIVALFSNYDSRRYPIRTVSQLTREIYTNPVLENFDGSFRGMAQRIEQNIRQPHLMDILNSITIYTDVHRGFNYWSGHQITASPVGFSGPEFAFPLFGNAGNAAPPVLVSLTGLGIFRTLSSPLYRRIILGSGPNNQELFVLDGTEFSFASLTTNLPSTIYRQRGTVDSLDVIPPQDNSVPPRAGFSHRLSHVTMLSQAAGAVYTLRAPTFSWQHRSAEFNNIIPSSQVTQIPLTKSTNLGSGTSVVKGPGFTGGDILRRTSPGQISTLRVNITAPLSQRYRVRIRYASTTNLQFHTSIDGRPINQGNFSATMCSGSNLQSGSFRTVGFTTPFNFPNGSSVFTLSAHVFNSGNEVYIDRIEFVPAEVTFEAEYDLERAQKAVNELFTSSNQIGLKTDVTDYHIDQVSNLVECLSDEFCLDEKQELSEKVKHAKRLSDERNLLQDPNFRGINRQLDRGWRGSTDITIQGGDDVFKENYVTLLGTFDECYPTYLYQKIDESKLKAYTRYQLRGYIEDSQDLEIYLIRYNAKHETVNVPGTGSLWPLSAQSPIGKCGEPNRCAPHLEWNPDLDCSCRDEGKCAHHSHHFSLDIDVGCTDLNEDLGVWVIFKIKTQDGHARLGNLEFLEEKPLVGEALARVKRAEKKWRDKREKLEWETNIVYKEAKESVDALFVNSQYDRLQADTNIAMIHAADKRVHSIREAYLPELSVIPGVNAAIFEELEGRIFTAFSLYDARNVIKNGDFNNGLSCWNVKGHVDVEEQNNHRSVLVVPEWEAEVSQEVRVCPGRGYILRVTAYKEGYGEGCVTIHEIENNTDELKFSNCVEEEVYPNNTVTCNDYTATQEEYEGTYTSRNRGYDGAYESNSSVPADYASAYEEKAYTDGRRDNPCESNRGYGDYTPLPAGYVTKELEYFPETDKVWIEIGETEGTFIVDSVELLLMEEVDA

SEQ ID NO: 60 - protein, 1163 aa, Bacillus thuringiensis INTA Mol-12
NECIPYNCLSNPEVEVLGGERIETGYTPIDISLSLTQFLLSEFVPGAGFVLGLVDIIWGIFGPSQWDAFLVQIEQLINQRIEEFARNQAISRLEGLSNLYQIYAESFREWEADPTNPALREEMRIQFNDMNSALTTAIPLLAVQNYQVPLLSVYVQAANLHLSVLRDVSVFGQRWGFDAATINSRYNDLTRLIGNYTDYAVRWYNTGLERVWGPDSRDWVRYNQFRRELTLTVLDIVALFSNYDSRRYPIRTVSQLTREIYTNPVLENFDGSFRGMAQRIGQNIRQPHLMDILNSITIYTDVHRGFNYWSGHQITASPVGFSGPEFAFPLFGNAGNAAPPVLVSLTGLGIFRTLSSPLYRRIILGSGPNNQELFVLDGTEFSFASLTTNLPSTIYRQRGTVDSLDVIPPQDNSVPPRAGFSHRLSHVTMLSQAAGAVYTLRAPTFSWQHRSAEFNNIIPSSQITQIPLTKSTNLGSGTSVVKGPGFTGGDILRRTSPGQISTLRVNITAPLSQRYRVRIRYASTTNLQFHTSIDGRPINQGNFSATMSSGSNLQSGSFRTVGFTTPFNFSNGSSVFTLSAHVFNSGNEVYIDRIEFVPAEVTFEAEYDLERAQKAVNELFTSSNQIGLKTDVTDYHIDQVSNLVECLSDEFCLDEKQELSEKVKHAKRLSDERNLLQDPNFRGINRQLDRGWRGSTDITIQGGDDVFKENYVTLLGTFDECYPTYLYQKIDESKLKAYTRYQLRGYIEDSQDLEIYLIRYNAKHETVNVPGTGSLWPLSAQSPIGKCGEPNRCAPHLEWNPDLDCSCRDGEKCAHHSHHFSLDIDVGCTDLNEDLGVWVIFKIKTQDGHARLGNLEFLEEKPLVGEALARVKRAEKKWRDKREKLEWETNIVYKEAKESVDALFVNSQYDQLQADTNIAMIHAADKRVHSIREAYLPELSVIPGVNAAIFEELEGRIFTAFSLYDARNVIKNGDFNNGLSCWNVKGHVDVEEQNNQRSVLVVPEWEAEVSQEVRVCPGRGYILRVTAYKEGYGEGCVTIHEIENNTDELKFSNCVEEEIYPNNTVTCNDYTVNQEEYGGAYTSRNRGYNEAPSVPADYASVYEEKSYTDGRRENPCEFNRGYRDYTPLPVGYVTKELEYFPETDKVWIEIGETEGTFIVDSVE

SEQ ID NO: 61 - protein, 1175 aa, Bacillus thuringiensis LS-R-21
MDNNPNINECIPYNCLSNPEVEVLGGERIETGYTPIDISLSLTQFLLSEFVPGAGFVLGLVDIIWGIFGPSQWDAFLVQIEQLINQRIEEFARNQAISRLEGLSNLYQIYAESFREWEADPTNPALREEMRIQFNDMNSALTTAIPLLAVQNYQVPLLSVYVQAANLHLSVLRDVSVFGQRWGFDAATINSRYNDLTRLIGNYTDYAVRWYNTGLERVWGPDSRDWVRYNQFRRELTLTVLDIVALFSNYDSRRYPIRTVSQLTREIYTNPVLENFDGSFRGMAQRIEQNIRQPHLMDILNSITIYTDVHRGFNYWSGHQITASPVGFSGPEFAFPLFGNAGNAAPPVLVSLTGLGIFRTLSSPLYRRIILGSGPNNQELFVLDGTEFSFASLTTNLPSTIYRQRGTVDSLDVIPPQDNSVPPRAGFSHRLSHVTMLSQAAGAVYTLRAPTFSWQHRSAEFNNIIPSSQITQIPLTKSTNLGSGTSVVKGPGFTGGDILRRTSPGQISTLRVNITAPLSQRYRVRIRYASTTNLQFHTSIDGRPINQGNFSATMSSGSNLQSGSFRTVGFTTPFNFSNGSSVFTLSAHVFNSGNEVYIDRIEFVPAEVTFEAEYDLERAQKAVNELFTSSNQIGLKTDVTDYHIDQVSNLVECLSDEFCLDEKQELSEKVKHAKRLSDERNLLQDPNFRGINRQLDRGWRGSTDITIQGGDDVFKENYVTLLGTFDECYPTYLYQKIDESKLKAYTRYQLRGYIEDSQDLEIYLIRYNAKHETVNVPGTGSLWPLSAQSPIGKCGEPNRCAPHLEWNPDLDCSCRDGEKCAHHSHHFSLDIDVGCTDLNEDLGVWVIFKIKTQDGHARLGNLEFLEEKPLVGEALARVKRAEKKWRDKREKLEWETNIVYKEAKESVDALFVNSQYDQLQADTNIAMIHAADKRVHSIREAYLPELSVIPGVNAAIFEELEGRIFTAFSLYDARNVIKNGDFNNGLSCWNVKGHVDVEEQNNQRSVLVVPEWEAEVSQEVRVCPGRGYILRVTAYKEGYGEGCVTIHEIENNTDELKFSNCVEEEIYPNNTVTCNDYTVNQEEYGGAYTSRNRGYNEAPSVPADYASVYEEKSYTDGRRENPCEFNRGYRDYTPLPVGYVTKELEYFPETDKVWIEIGETEGTFIVDSVELLLME

SEQ ID NO: 62 - protein, 934 aa, Bacillus thuringiensis sotto
MDNNPNINECIPYNCLSNPEVEVLGGERIETGYTPIDISLSLTQFLLSEFVPGAGFVLGLVDIIWGIFGPSQWDAFLVQIEQLINQRIEEFARNQAISRLEGLSNLYQIYAESFREWEADPTNPALREEMRIQFNDMNSALTTAIPLFAVQNYQVPLLSVYVQAANLHLSVLRDVSVFGQRWGFDAATINSRYNDLTRLIGNYTDYAVRWYNTGLERVWGPDSRDWVRYNQFRRELTLTVLDIVALFSNYDSRRYPIRTVSQLTREIYTNPVLENFDGSFRGMAQRIEQNIRQPHLMDILNRITIYTDVHRGFNYWSGHQITASPVGFSGPEFAFPLFGNAGNAAPPVLVSLTGLGIFRTLSSPLYRRIILGSGPNNQELFVLDGTEFSFASLTTNLPSTIYRQRGTVDSLDVIPPQDNSVPPRAGFSHRLSHVTMLSQAAGAVYTLRAPTFSWQHRSAEFNNIIPSSQITQIPLTKSTNLGSGTSVVKGPGFTGGDILRRTSPGQISTLRVNITAPLSQRYRVRIRYASTTNLQFHTSIDGRPINQGNFSATMSSGSNLQSGSFRTVGFTTPFNFSNGSSVFTLSAHVFNSGNEVYIDRIEFVPAEVTFEAEYDLERAQKAVNELFTSSNQIGLKTDVTDYHIDQVSNLVECLSDEFCLDEKQELSEKVKHAKRLSDERNLLQDPNFRGINRQLDRGWRGSTDITIQGGDDVFKENYVTLLGTFDECYPTYLYQKIDESKLKAYTRYQLRGYIEDSQDLEIYLIRYNAKHETVNVPGTGSLWPLSAQSPIGKCGEPNRCAPHLEWNPDLDCSCRDGEKCAHHSHHFSLDIDVGCTDLNEDLGVWVIFKIKTQDGHARLGNLEFLEEKPLVGEALARVKRAEKKWRDKREKLEWETNIVYKEAKESVDALFVNSQYDRLQADTNIAMIHAADKR

SEQ ID NO: 63 - protein, 1176 aa, Bacillus thuringiensis aizawai IPL7; identical to SEQ ID NO: 57

SEQ ID NO: 64 - protein, 1176 aa, Bacillus thuringiensis entomocidus
MDNNPNINECIPYNCLSNPEVEVLGGERIETGYTPIDISLSLTQFLLSEFVPGAGFVLGLVDIIWGIFGPSQWDAFPVQIEQLINQRIEEFARNQAISRLEGLSNLYQIYAESFREWEADPTNPALREEMRIQFNDMNSALTTAIPLLAVQNYQVPLLSVYVQAANLHLSVLRDVSVFGQRWGFDAATINSRYNDLTRLIGNYTDYAVRWYNTGLERVWGPDSRDWVRYNQFRRELTLTVLDIVALFSNYDSRRYPIRTVSQLTREIYTNPVLENFDGSFRGMAQRIEQNIRQPHLMDILNSITIYTDVHRGFNYWSGHQITASPVGFSGPEFAFPLFGNAGNAAPPVLVSLTGLGIFRTLSSPLYRRIILGSGPNNQELFVLDGTEFSFASLTTNLPSTIYRQRGTVDSLDVIPPQDNSVPPRAGFSHRLSHVTMLSQAAGAVYTLRAPTFSWQHRSAEFNNIIPSSQITQIPLTKSTNLGSGTSVVKGPGFTGGDILRRTSPGQISTLRVNITAPLSQRYRVRIRYASTTNLQFHTSIDGRPINQGNFSATMSSGSNLQSGSFRTVGFTTPFNFSNGSSVFTLSAHVFNSGNEVYIDRIEFVPAEVTFEAEYDLERAQKAVNELFTSSNQIGLKTDVTDYHIDQVSNLVECLSDEFCLDEKQELSEKVKHAKRLSDERNLLQDPNFRGINRQLDRGWRGSTDITIQGGDDVFKENYVTLLGTFDECYPTYLYQKIDESKLKAYTRYQLRGYIEDSQDLEIYLIRYNAKHETVNVPGTGSLWPLSAQSPIGKCGEPNRCAPHLEWNPDLDCSCRDGEKCAHHSHHFSLDIDVGCTDLNEDLGVWVIFKIKTQDGHARLGNLEFLEEKPLVGEALARVKRAEKKWRDKREKLEWETNIVYKEAKESVDALFVNSQYDQLQADTNIAMIHAADKRVHSIREAYLPELSVIPGVNAAIFEELEGRIFTAFSLYDARNVIKNGDFNNGLSCWNVKGHVDVEEQNNQRSVLVVPEWEAEVSQEVRVCPGRGYILRVTAYKEGYGEGCVTIHEIENNTDELKFSNCVEEEIYPNNTVTCNDYTVNQEEYGGAYTSRNRGYNEAPSVPADYASVYEEKSYTDGRRENPCEFNRGYRDYTPLPVGYVTKELEYFPETDKVWIEIGETEGTFIVDSVELLLMEE

SEQ ID NO: 65 - protein, 1176 aa, Bacillus thuringiensis Fu-2-7
MDNNPNINECIPYNCLSNPEVEVLGGERIETGYTPIDISLSLTQFLLSEFVPGAGFVLGLVDIIWGIFGPSQWDAFLVQIEQLINQRIEEFARNQAISRLEGLSNLYQIYAESFREWEADPTNPALREEMRIQFNDMNSALTTAIPLLAVQNYQVPLLSVYVQAANLHLSVLRDVSVFGQRWGFDAATINSRYNDLTRLIGNYTDYAVRWYNTGLERVWGPDSRDWVRYNQFRRELTLTVLDIVALFSNYDSRRYPIRTVSQLTREIYTNPVLENFDGSFRGMAQRIEQNIRQPHLMDILNSITIYTDVHRGFNYWSGHQITASPVGFSGPEFAFPLFGNAGNAAPPVLVSLTGLGIFRTLSSPLYRRIILGSGPNNQELFVLDGTEFSFASLTTNLPSTIYRQRGTVDSLDVIPPQDNSVPPRAGFSHRLSHVTMLSQAAGAVYTLRAPTFSWQHRSAEFNNIIPSSQITQIPLTKSTNLGSGTSVVKGPGFTGGDILRRTSPGQISTLRVNITAPLSQRYRVRIRYASTTNLQFHTSIDGRPINQGNFSATMSSGSNLQSGSFRTVGFTTPFNFSNGSSVFTLSAHVFNSGNEVYIDRIEFVPAEVTFEAEYDLERAQKAVNELFTSSNQIGLKTDVTDYHIDQVSNLVECLSDEFCLDEKQELSEKVKHAKRLSDERNLLQDPNFRGINRQLDRGWRGSTDITIQGGDDVFKENYVTLLGTFDECYPTYLYQKIDESKLKAYTRYQLRGYIEDSQDLEIYLIRYNAKHETVNVPGTGSLWPLSAQSPIGKCGEPNRCAPHLEWNPDLDCSCRDGEKCAHHSHHFSLDIDVGCTDLNEDLGVWVIFKIKTQDGHARLGNLEFLEEKPLVGEALARVKRAEKKWRDKREKLEWETNIVYKEAKESVDALFVNSQYDQLQADTNIAMIHAADKRVHSIREAYLPELSVIPGVNAAIFEELEGRISTAFSLYDARNVIKNGDFNNGLSCWNVKGHVDVEEQNNQRSVLVVPEWEAEVSQEVRVCPGRGYILRVTAYKEGYGEGCVTIHEIENNTDELKFSNCVEEEIYPNNTVTCNDYTVNQEEYGGAYTSRNRGYNEAPSVPADYASVYEEKSYTDGRRENPCEFNRGYRDYTPLPVGYVTKELEYFPETDKVWIEIGETEGTFIVDSVELLLMEE

SEQ ID NO: 66 - protein, 620 aa, Bacillus thuringiensis kurstaki NRD-12
MDNNPNINECIPYNCLSNPEVEVLGGERIETGYTPIDISLSLTQFLLSEFVPGAGFVLGLVDIIWGIFGPSQWDAFLVQIEQLINQRIEEFARNQAISRLEGLSNLYQIYAESFREWEADPTNPALREEMRIQFNDMNSALTTAIPLLAVQNYQVPLLSVYVQAANLHLSVLRDVSVFGQRWGFDAATINSRYNDLTRLIGNYTDYAVRWYNTGLERVWGPDSRDWVRYNQFRRELTLTVLDIVALFSNYDSRRYPIRTVSQLTREIYTNPVLENFDGSFRGMAQRIEQNIRQPHLMDILNSITIYTDVHRGFNYWSGHQITASPVGFSGPEFAFPLFGNAGNAAPPVLVSLTGLGIFRTLSSPLYRRIILGSGPNNQELFVLDGTEFSFASLTTNLPSTIYRQRGTVDSLDVIPPQDNSVPPRAGFSHRLSHVTMLSQAAGAVYTLRAPTFSWQHRSAEFNNIIPSSQITQIPLTKSTNLGSGTSVVKGPGFTGGDILRRTSPGQISTLRVNITAPLSQRYRVRIRYASTTNLQFHTSIDGRPINQGNFSATMSSGSNLQSGSFRTVGFTTPFNFSNGSSVFTLSAHVFNSGNEVYIDRIEFVPAEVTFEAEYDLERAQ

SEQ ID NO: 67 - protein, 1176 aa, Bacillus thuringiensis C12
MDNNPNINECIPYNCLSNPEVEVLGGERIETGYTPIDISLSLTQFLLSEFVPGAGFVLGLVDIIWGIFGPSQWDAFLVQIEQLINQRIEEFARNQAISRLEGLSNLYQIYAESFREWEADPTNPALREEMRIQFNDMNSALTTAIPLLAVQNYQVPLLSVYVQAANLHLSVLRDVSVFGQRWGFDAATINSRYNDLTRLIGNYTDYAVRWYNTGLERVWGPDSRDWVRYNQFRRELTLTVLDIVALFSNYDSRRYPIRTVSQLTREIYTNPVLENFDGSFRGMAQRIEPEYRQPHLMDILNSITIYTDVHRGFNYWSGHQITTSPVGFSGPEFAFPLFGNAGNAAPPVLVSLTGLGIFRTLSSPLYRRIILGSGPNNQELFVLDGTEFSFASLTTNLPSTIYRQRGTVDSLDVIPPQDNSVPPRAGFSHRLSHVPMLSQAAGAVYTLRASLFLRLDPSAEFNNIIPSFTNYQIPLTKSTNLGSGTSVVKGPGFTGGDILRRTSPGLISTLRVNITAPLSQRYRVRIRYASTTNLQFHTSIDGRPINQGNFYATMSSGSNLQSGSFRTVGFTTPFNFSNGSSVFTLSAHVFNSGNEVYIDRIEFVPAEVTFEAEYDLERAQNGVNQLFTSSNQIGLKTDGTDYHIDQVSNLVECLSDEFCLDEKQELSEKVKHAKRLSDERNLLQDPNFRGINRQLDRGWRGSHDITIQGGDDVFKENYVTLLGTFDECYPTYLYQKIDQSKLKAYTSYQLRGYIEDSQDLEIYLIRYNAKQQTVNVPGTGSLWPVSAPKPIGKCGEPNRCAPHLEWNPDLDCSCRDGEKCAHHSHHFSLDIDVGCTDLNEDLGVWVIFKIKTEDGHARLGNLEFLEEKPLVGEALARVKRAEKKWRDKREKLEWETNIVYKEAKESVDALFVNSQYDQLQADTNIAMIHAADKRVHSIREAYLPELSVIPGVNAAIFEELEGRIFTAFSLYDARNVIKNGDFNNGLSCWNVKGHVDVEEQNNQRSVLVVPEWEAEVSQEVRVCPGRGYILRVTAYKEGYGEGCVTIHEIENNTDELKFSNCVEEEIYPNNTVTCNDYTVNQEEYGGAYTSRNRGYNEAPSVPADYASVYEEKSYTDGRRENPCEFNRGYRDYTGLPVGYVTKALEYFPETDKVWIEIGETEGTFIVDSVELLLMEE

SEQ ID NO: 68 - protein, 1180 aa, Bacillus thuringiensis dendrolimus T84A1; identical to SEQ ID NO: 58

SEQ ID NO: 69 - protein, 1155 aa, Bacillus thuringiensis berliner 1715
MDNNPNINECIPYNCLSNPEVEVLGGERIETGYTPIDISLSLTQFLLSEFVPGAGFVLGLVDIIWGIFGPSQWDAFLVQIEQLINQRIEEFARNQAISRLEGLSNLYQIYAESFREWEADPTNPALREEMRIQFNDMNSALTTAIPLFAVQNYQVPLLSVYVQAANLHLSVLRDVSVFGQRWGFDAATINSRYNDLTRLIGNYTDHAVRWYNTGLERVWGPDSRDWIRYNQFRRELTLTVLDIVSLFPNYDSRTYPIRTVSQLTREIYTNPVLENFDGSFRGSAQGIEGSIRSPHLMDILNSITIYTDAHRGEYYWSGHQIMASPVGFSGPEFTFPLYGTMGNAAPQQRIVAQLGQGVYRTLSSTLYRRPFNIGINNQQLSVLDGTEFAYGTSSNLPSAVYRKSGTVDSLDEIPPQNNNVPPRQGFSHRLSHVSMFRSGFSNSSVSIIRAPMFSWIHRSAEFNNIIPSSQITQIPLTKSTNLGSGTSVVKGPGFTGGDILRRTSPGQISTLRVNITAPLSQRYRVRIRYASTTNLQFHTSIDGRPINQGNFSATMSSGSNLQSGSFRTVGFTTPFNFSNGSSVFTLSAHVFNSGNEVYIDRIEFVPAEVTFEAEYDLERAQKAVNELFTSSNQIGLKTDVTDYHIDQVSNLVECLSDEFCLDEKKELSEKVKHAKRLSDERNLLQDPNFRGINRQLDRGWRGSTDITIQGGDDVFKENYVTLLGTFDECYPTYLYQKIDESKLKAYTRYQLRGYIEDSQDLEIYLIRYNAKHETVNVPGTGSLWPLSAPSPIGKCAHHSHHFSLDIDVGCTDLNEDLGVWVIFKIKTQDGHARLGNLEFLEEKPLVGEALARVKRAEKKWRDKREKLEWETNIVYKEAKESVDALFVNSQYDRLQADTNIAMIHAADKRVHSIREAYLPELSVIPGVNAAIFEELEGRIFTAFSLYDARNVIKNGDFNNGLSCWNVKGHVDVEEQNNHRSVLVVPEWEAEVSQEVRVCPGRGYILRVTAYKEGYGEGCVTIHEIENNTDELKFSNCVEEEVYPNNTVTCNDYTATQEEYEGTYTSRNRGYDGAYESNSSVPADYASAYEEKAYTDGRRDNPCESNRGYGDYTPLPAGYVTKELEYFPETDKVWIEIGETEGTFIVDSVELLLMEE

SEQ ID NO: 70 - protein, 1155 aa, Bacillus thuringiensis kurstaki S93; identical to SEQ ID NO: 69

SEQ ID NO: 71 - protein, 1155 aa, Bacillus thuringiensis c005; identical to SEQ ID NO: 69

SEQ ID NO: 72 - protein, 1155 aa, Bacillus thuringiensis
MDNNPNINECIPYNCLSNPEVEVLGGERIETGYTPIDISLSLTQFLLSEFVPGAGFVLGLVDIIWGIFGPSQWDAFLVQIEQLINQRIEEFARNQAISRLEGLSNLYQIYAESFREWEADPTNPALREEMRIQFNDMNSALTTAIPLFAVQNYQVPLLSVYVQAANLHLSVLRDVSVFGQRWGFDAATINSRYNDLTRLIGNYTDHAVRWYNTGLERVWGPDSRDWIRYNQFRRELTLTVLDIVSLFPNYDSRTYPIRTVSQLTREIYTNPVLENFDGSFRGSAQGIEGSIRSPHLMDILNSITIYTDAHRGEYYWSGHQIMASPVGFSGPEFTFPLYGTMGNAAPQQRIVAQLGQGVYRTLSSTLYRRPFNIGINNQQLSVLDGTEFAYGTSSNLPSAVYRKSGTVDSLDEIPPQNNNVPPRQGFSHRLSHVSMFRSGFSNSSVSIIRAPMFSWIHRSAEFNNIIPSSQITQIPLTKSTNLGSGTSVVKGPGFTGGDILRRTSPGQISTLRVNITAPLSQRYRVRIRYASTTNLQFHTSIDGRPINQGNFSATMSSGSNLQSGSFRTVGFTTPFNFSNGSSVFTLSAHVFNSGNEVYIDRIEFVPAEVTFEAEYDLERAQKAVNELFTSSNQIGLKTDVTDYHIDQVSNLVECLSDEFCLDEKKELSEKVKHAKRLSDERNLLQDPNLRGINRQLDRGWRGSTDITIQGGDDVFKENYVTLLGTFDECYPTYLYQKIDESKLKAYTRYQLRGYIEDSQDLEIYLIRYNAKHETVNVPGTGSLWPLSAPSPIGKCAHHSHHFSLDIDVGCTDLNEELGVWVIFKIKTQDGHARLGNLEFLEEKPLVGEALARVKRAEKKWRDKREKLEWETNIVYKEAKESVDALFINSQYDRLQADTNIAMIHAADKRVHSIREAYLPELSVIPGVNAAIFEELEGRISTAFSLYDARNVIKNGDFNNGLSCWNVKGHVDVEEQNNHRSVLVVPEWEAEVSQEVRVCPGRGYILRVTAYKEGYGEGCVTIHEIENNTDELKFSNCVEEEVYPNNTVTCNDYTATQEEYEGTYTSRNRGYDGAYESNSSVPADYASAYEEKAYTDGRRDNPCESNRGYGDYTPLPAGYVTKELEYFPETDKVWIEIGETEGTFIVDSVELLLMEE

SEQ ID NO: 73 - protein, 1155 aa, Bacillus thuringiensis B-Hm-16; identical to SEQ ID NO: 69

SEQ ID NO: 74 - protein, 1155 aa, Bacillus thuringiensis AC-11
MDNNPNINECIPYNCLSNPEVEVLGGERIETGYTPIDISLSLTQFLLSEFVPGAGFVLGLVDIIWGIFGPSQWDAFLVQIEQLINQRIEEFARNQAISRLEGLSNLYQIYAESFREWEADPTNPALREEMRIQFNDMNSALTTAIPLFAVQNYRVPLLSVYVQAVNLHLSVLRDVLVFGQRWGFDAATINSRYNDLTRLIGNYTDHAVRWYNTGLERVWGPDSRDWIRYNQFRRELTLTVLDIVSLFPNYDSRTYPIRTVSQLTREIYTNPVLENFDGSFRGSAQGIEGSIRSPHLMDILNSITIYTDAHRGEYYWSGHQIMASPVGFSGPEFTFPLYGTMGNAAPQQRIVAQLGQGVYRTLSSTLYRRPFNIGINNQQLSVLDGTEFAYGTSSNLPSAVYRKSGTVDSLDEIPPQNNNVPPRQGFSHRLSHVSMFRSGFSNSSVSIIRAPMFSWIHRSAEFNNIIPSSQITQIPLTKSTNLGSGTSVVKGPGFTGGDILRRTSPGQISTLRVNITAPLSQRYRVRIRYASTTNLQFHTSIDGRPINQGNFSATMSSGSNLQSGSFRTVGFTTPFNFSNGSSVFTLSAHVFNSGNEVYIDRIEFVPAEVTFEAEYDLERAQKAVNELFTSSNQIGLKTDVTDYHIDQVSNLVECLSDEFCLDEKKELSEKVKHAKRLSDERNLLQDPNFRGINRQLDRGWRGSTDITIQGGDDVFKENYVTLLGTFDECYPTYLYQKIDESKLKAYTRYQLRGYIEDSQDLEIYLIRYNAKHETVNVPGTGSLWPLSAPSPIGKCAHHSHHFSLDIDVGCTDLNEDLGVWVIFKIKTQDGHARLGNLEFLEEKPLVGEALARVKRAEKKWRDKREKLEWETNIVYKEAKESVDAVFVNSQYDRLQADTNIAMIHAADKRVHSIREAYLPELSVIPGVNAAIFEELEGRIFTAFSLYDARNVIKNGDFNNGLSCWNVKGHVDVEEQNNHRSVLVVPEWEAEVSQEVRVCPGRGYILRVTAYKEEYGEGCVTIHEIENNTAELKFSNCVEEEVYPNNTVTCNDYTATQEEYEGTYTSRNRGYDGAYESNSSVPADYASAYEEKAYTDGRRDNPCESNRGYGDYTPLPAGYVTRELEYFPETDKVWIEIGETEGTFIVDSVELLLMEE

SEQ ID NO: 75 - protein, 1156 aa, Bacillus thuringiensis WB9
MDNNPNINECIPYNCLSNPEVEVLGGERIETGYTPIDISLSLTQFLLSEFVPGAGFVLGLVDIIWGIFGPSQWDAFLVQIEQLINQRIEEFARNQAISRLEGLSNLYQIYAESFREWEADPTNPALREEMRIQFNDMNSALTTAIPLFAVQNYQVPLLSVYVQAANLHLPVLRDVSVFGQRWGFDAATINSRYNDLTRLIGNYTDHAVRWYNTGLERVWGPDSRDWIRYNQFRRELTLTVLDIVSLFPNYDSRTYPIRTVSQLTREIYTNPVLENFDGSFRGSAQGIEGSIRSPHLMDILNSITIYTDAHRGEYYWSGHQIMASPVGFSGPEFTFPLYGTMGNAAPQQRIVAQLGQGVYRTLSSTLYRRPFNIGINNQQLSVLDGTEFAYGTSSNLPSAVYRKSGTVDSLDEIPPQNNNVPPRQGFSHRLSHVSMFRSGFSNSSVSIIGAPMFSWIHRSAEFNNIIPSSQITQIPLTKSTNLGSGTSVVKGPGFTGGDILRRTSPGQISTLRVNITAPLSQRYRVRIRYASTTNLQFHTSIDGRPINQGNFSATMSSGSNLQSGSFRTVGFTTPFNFSNGSSVFTLSAHVFNSGNEVYIDRIEFVPAEVTFEAEYDLERAQKAVNELFTSSNQIGLKTDVTDYHIDQVSNLVECLSDEFCLDEKKELSEKVKHAKRLSDERNLLQDPNFRGINRQLDRGWRGSTDITIQGGDDVFKENYVTLLGTFDECYPTYLYQKIDESKLKAYTRYQLRGYIEDSQDLEIYLIRYNAKHETVNVPGTGSLWPLSAPSPIGKCGAHHSHHFSLDIDVGCTDLNEDLGVWVIFKIKTQDGHARLGNLEFLEEKPLVGEALARVKRAEKKWRGKREKLEWETNIVYKEAKESVDALFVNSQYDRLQADTNIAMIHAADKRVHSIREAYLPELSVIPGVNAAIFEELEGRIFTAFSLYDARNVIKNGDFNNGLSCWNVKGHVDVEEQNNHRSVLVVPEWEAEVSQEVRVCPGRGYILRVTAYKEGYGEGCVTIHEIENNTDELKFSNCVEEEVYPNNTVTCNDYTATQEEYEGTYTSRNRGYDGAYESNSSVPADYASAYEEKAYTDGRRDNPCESNRGYGDYTPLPAGYVTKELEYFPETDKVWIEIGETEGTFIVDSVELLLMEE

SEQ ID NO: 76 - protein, 1177 aa, Bacillus thuringiensis
MDNNPNINECIPYNCLSNPEVEVLGGERIETGYTPIDISLSLTQFLLSEFVPGAGFVLGLVDIIWGIFGPSQWDAFLVQIEQLINQRIEEFARNQAISRLEGLSNLYQIYAESFREWEADPTNPALREEMRIQFNDMNSALTTAIPLFAVQNYQVPLLSVYVQAANLHLSVLRDVSVFGQRWGFDAATINSRYNDLTRLIGNYTDYAVRWYNTGLERVWGPDSRDWIRYNQFRRELTLTVLDIVSLFPNYDSRTYPIRTVSQLTREIYTNPVLENFDGSFRGSAQGIEGSIRSPHLMDILSSITIYTDAHRGEYYWSGHQIMASPVGFSGPEFTFPLYGTMGNAAPQQRIVAQLGQGVYRTLSSTLYRRPFNIGINNQQLSVLDGTEFAYGTSSNLPSAVYRKSGTVDSLDEIPPQNNNVPPRQGFSHRLSHVSMFRSGFSNSSVSIIRAPMFSWIHRSAEFNNIIPSSQITQIPLTKSTNLGSGTSVVKGPGFTGGDILRRTSPGQISTLRVNITAPLSQRYRVRIRYASTTNLQFHTSIDGRPINQGNFSATMSSGSNLQSGSFRTVGFTTPFNFSNGSSVFTLSAHVFNSGNEVYIDRIEFVPAEVTFEAEYDLERAQKAVNELFTSSNQIGLKTDVTDYHIDQVSNLVECLSDEFCLDEKQEVSEKVKHAKRLSDERNLLQDPNFRGINRQLDRGWRGSTDITIQGGDDVFKENYVTLPGTFDECYPTYLYQKIDESKLKAYTRYQLRGYIEDSQDLEIYLIRYNAKHETVNVPGTGSLWPLSAQSPIGKCGEPNRCAPHLEWNPDLDCSCRDGEKCAHHSHHFSLDIDVGCTDLNEDLGVWVIFKIKTQDGHARLGNLEFLEEKPLVGEALARVKRAEKKWRDKREKLEWETNIVYKEAKESVDALFVNSQYDQLQADTNIAMIHAADKRVHSIREAYLPELSVIPGVNAAIFEELEGCIFTAFSLYDARNVIKNGDFNNGLSCWNVKGHVDVEEQNNHRSVLVVPEWEAEVSQEVRVCPGRGYILRVTAYKEGYGEGCVTIHEIENNTDELKFSNCVEEEIYPNNTVTCNDYTVNQEEYEGAYTSRNRGYNEAPSVPADYASVYEEKSYTDGRRENPCEFNRGYRDYTLLPVGYVTKELEYFPETDKVWIEIGETEGTFIVDSVELLLMEE

SEQ ID NO: 77 - protein, 1155 aa, Bacillus thuringiensis X-2
MDNNPNINECIPYNCLSNPEVEVLGGERIETGYTPIDISLSLTQFLLSEFVPGAGFVLGLVDIIWGIFGPSQWDAFLVQIEQLINQRIEEFARNQAISRLEGLSNLYQIYAESFREWEADPTNPALREEMRIQFNDMNSALTTAIPLFAVQNYQVPLLSVYVQAANLHLSVLRDVSVFGQRWGFDAATINSRYNDLTRLIGNYTDHAVRWYNTGLERVWGPDSRDWIRYNQFRRELTLTVLDIVSLFPNYDSRTYPIRTVSQLTREIYTNPVLENFDGSFRGSAQGIEGSIRSPHLMDILNSITIYTDAHRGEYYWSGHQIMASPVGFSGPEFTFPLYGTMGNAAPQQRIVAQLGQGVYRTLSSTLYRRPFNIGINNQQLSVLDETEFAYGTSSNLPSAVYRKSGTVDSLDEIPPQNNNVPPRQGFSHRLSHVSMFRSGFSNSSVSIIRAPMFSWIHRSAEFNNIIPSSQITQIPLTKSTNLGSGTSVVKGPGFTGGDILRRTSPGQISTLRVNITAPLSQRYRVRIRYASTTNLQFHTSIDGRPINQGNFSATMSSGSNLQSGSFRTVGFTTPFNFSNGSSVFTLSAHVFNSGNEVYIDRIEFVPAEVTFEAEYDLERAQKAVNELFTSFNQIGLKTDVTDYHIDQVSNLVECLSDEFCLDEKKELSEKVKHAKRLSDERNLLQDPNFRGINRQLDRGWRGSTDITIQGGDDVFKENYVTLLGTFDECYPTYLYQKIDESKLKAYTRYQLRGYIEDSQDLEIYLIRYNAKHETVNVPGTGSLWPLSAPSPIGKCAHHSHHFSLDIDVGCTDLNEDLGVWVIFKIKTQDGHARLGNLEFLEEKPLVGEALARVKRAEKKWRDKREKLEWETNIVYKEAKESVDALFVNSQYDRLQADTNIAMIHPADKRVHSIREAYLPELSVIPGVNAAIFEELEGRIFTAFSLYDARNVIKNGDFNNGLSCWNVKGHVDVEEQNNHRSVLVVPEWEAEVSQEVRVCPGRGYILRVTAYKEGYGEGCVTIHEIENNTDELKFSNCVEEEVYPNNTVTCNDYTATQEEYEGTYTSRNRGYDGAYESNSSVPADYASAYEEKAYTDGRRDNPCESNRGYGDYTPLPAGYVTKELEYFPETDKVWIEIGETEGTFIVDSVELLLMKE

SEQ ID NO: 78 - protein, 1156 aa, Bacillus thuringiensis kurstaki
MDNNPNINECIPYNCLSNPEVEVLGGERIETGYTPIDISLSLTQFLLSEFVPGAGFVLGLVDIIWGIFGPSQWDAFLVQIEQLINQRIEEFARNQAISRLEGLSNLYQIYAESFREWEADPTNPALREEMRIQFNDMNSALTTAIPLFAVQNYQVPLLSVYVQAANLHLSVLRDVSVFGQRWGFDAATINSRYNDLTRLIGNYTDHRVRWYNTGLERVWGPDSRDWIRYNQFRRELTLTVLDIVSLFPNYDSRTYPIRTVSQLTREIYTNPVLENFDGSFRGSAQGIEGSIRSPHLMDILNSITIYTDAHRGEYYWSGHQIMASPVGFSGPEFTFPLYGTMGNAAPQQRIVAQLGQGVYRTLSSTLYRRPFNIGINNQQLSGPDGGRICLWNLLKFGQPPYTEKAEPVDSPDEIPPQNNNVPPRQGFSHRCLAYVSMFYSGFSNSSVSVIRAPNDSSWTYCSAEFGDVIPSSQITQIPLTKLQSWLWNSVVKGLGFTGGDILEELTGQISTLRVNITAPLSQRYRVRIRYASTTNLQFHTSIDGRPINQGNFSATMSSGSNLQSGSFRTVGFTTPFNFSNGSSVFTLSAHVFNSGNEVYIDRIEFVPAEVTFEAEYDLERAQKAVNELFTSSNQIGLKTDVTDYHIDQVSNLVECLSDEFCLDEKKELSEKVKHAKRLSDERNLLQDPNFRGINRQLDRGWRGNTDITIQGGHDVFKENYVTLLGTFDECYPTYLYQKIDESKLKAYTRYQLRGYIEDSQDLEIYLIRYNAKHETVNVPGTGSLWPLSAPSPIGKCAHHSHHFSLDIDVGCTDLNEDLGVWVIFKIKTQDGHARLGNLEFLEEKPLVGEALARVKRAEKKWRDKREKLEWETNIVYKEAKESVDALFVNSQYDRLQADTNIAMIHAADKRVHSIREAYLPELSVIPGVNAAIFEELEGRIFTAFSLYDARNVIKNGDFNNGLSCWNVKGHVDVEEQNNHRSVLVVPEWEAEVSQEVRVCPGRGYILRVTAYKEGYGEGCVTIHEIENNTDELKFSNCVEEEVYPNNTVTCNDYTATQEEYEGTYTSRNRGYDGAYESNSSVPADYASAYEEKAYTDGRRDNPCESNRGYGDYTPLPAGYVTKELEYFPETDKVWIEIGETEGTFIVDSVELLLMEE

SEQ ID NO: 79 - protein, 1155 aa, Bacillus thuringiensis C008
MDNNPNINECIPYNCLSNPEVEVLGGERIETGYTPIDISLSLTQFLLSEFVPGAGFVLGLVDIIWGIFGPSQWDAFLVQIEQLINQRIEEFARNQAISRLEGLSNLYQIYAESFREWEADPTNPALREEMRIQFNDMNSALTTAIPLFAVQNYQVPLLSVYVQAANLHLSVLRDVSVFGQRWGFDAATINSRYNDLTRLIGNYTDHAVRWYNTGLERVWGPDSRDWIRYNQFRRELTLTVLDIVSLFPNYDSRTYPIRTVSQLTREIYTNPVLENFDGSFRGSAQGIEGSIRSPHLMDILNSITIYTDAHRGEYYWSGHQIMASPVGFSGPEFTFPLYGTMGNAAPQQRIVAQLGQGVYRTLSSTLYRRPFNIGINNQQLSVLDGTEFAYGTSSNLPSAVYRKSGTVDSLDEIPPQNNNVPPRQGFSHRLSHVSMFRSGFSNSSVSIIRAPMFSWIHRSAEFNNIIPSSQITQIPLTKSTNLGSGTSVVKGPGFTGGDILRRTSPGQISTLRVNITAPLSQRYRVRIRYASTTNLQFHTSIDGRPINQGNFSATMSSGSNLQSGSFRTVGFTTPFNFSNGSSVFTLSAHVFNSGNEVYIDRIEFVPAEVTFEAEYDLERAQKAVNELFTSSNQIGLKTDVTDYHIDQVSNLVECLSDEFCLDEKKELSEKVKHAKRLSDERNLLQDPNFRGINRQLDRGWRGSTDITIQGGDDVFKENYVTLLGTFDECYPTYLYQKIDESKLKAYTRYQLRGYIEDSQDLEIYLIRYNAKHETVNVPGTGSLWPLSAPSPIGKCAHHSHHFSLDIDVGCTDLNEDLGVWVIFKIKTQDGHARLGNLEFLEEKPLVGEALARVKRAEKKWRDKREKLEWETNIVYKEAKESVDALFVNSQYDRLQADTNIAMIHAADKRVHSIREAYLPELSVIPGVNAAIFEELEGRIFTAFSLYDARNVIKNGDFNNGLSCWNVKGHVDVEEQNNHRSVLVVPEWEAEVSQEVRVCPGRGYILRVTAYKEGYGEGCVTIHEIENNTDELKFSNCVEEEVYPNNTVTCNDYTATQEEYEGTYTSRNPGYDGAYESNSSVPADYASAYEEKAYTDGRRDNPCESNRGYGDYTPLPAGYVTKELEYFPETDKVWIEIGETEGTFIVDSVELLLMEE

SEQ ID NO: 80 - protein, 1155 aa, Bacillus thuringiensis IS5056
MDNNPNINECIPYNCLSNPEVEVLGGERIETGYTPIDISLSLTQFLLSEFVPGAGFVLGLVDIIWGIFGPSQWDAFLVQIEQLINQRIEEFARNQAISRLEGLSNLYQIYAESFREWEADPTNPALREEMRIQFNDMNSALTTAIPLFAVQNYQVPLLSVYVQAANLHLSVLRDVSVFGQRWGFDAATINSRYNDLTRLIGNYTDHAVRWYNTGLERVWGPDSRDWIRYNQFRRELTLTVLDIVSLFPNYDSRTYPIRTVSPLTREIYTNPVLENFDGSFRGSAQGIEGSIRSPHLMDILNSITIYTDAHRGEYYWSGHQIMASPVGFSGPEFTFPLYGTMGNAAPQQRIVAQLGQGVYRTLSSTLYRRPFNIGINNQQLSVLDGTEFAYGTSSNLPSAVYRKSGTVDSLDEIPPQNNNVPPRQGFSHRLSHVSMFRSGFSNSSVSIIRAPMFSWIHRSAEFNNIIPSSQITQIPLTKSTNLGSGTSVVKGPGFTGGDILRRTSPGQISTLRVNITAPLSQRYRVRIRYASTTNLQFHTSIDGRPINQGNFSATMSSGSNLQSGSFRTVGFTTPFNFSNGSSVFTLSAHVFNSGNEVYIDRIEFVPAEVTFEAEYDLERAQKAVNELFTSSNQIGLKTDVTDYHIDQVSNLVECLSDEFCLDEKKELSEKVKHAKRLSDERNLLQDPNFRGINRQLDRGWRGSTDITIQGGDDVFKENYVTLLGTFDECYPTYLYQKIDESKLKAYTRYQLRGYIEDSQDLEIYLIRYNAKHETVNVPGTGSLWPLSAPSPIGKCAHHSHHFSLDIDVGCTDLNEDLGVWVIFKIKTQDGHARLGNLEFLEEKPLVGEALARVKRAEKKWRDKREKLEWETNIVYKEAKESVDALFVNSQYDRLQADTNIAMIHAADKRVHSIREAYLPELSVIPGVNAAIFEELEGRIFTAFSLYDARNVIKNGDFNNGLSCWNVKGHVDVEEQNNHRSVLVVPEWEAEVSQEVRVCPGRGYILRVTAYKEGYGEGCVTIHEIENNTDELKFSNCVEEEVYPNNTVTCNDYTATQEEYEGTYTSRNRGYDGAYESNSSVPADYASAYEEKAYTDGRRDNPCESNRGYGDYTPLPAGYVTKELEYFPETDKVWIEIGETEGTFIVDSVELLLMEE

SEQ ID NO: 81 - protein, 1155 aa, Bacillus thuringiensis S2491Ab
MDNNPNINECIPYNCLSNPEVEVLGGERIETGYTPIDISLSLTQFLLSEFVPGAGFVLGLVDIIWGIFGPSQWDAFLVQIEQLINQRIEEFARNQAISRLEGLSNLYQIYAESFREWEADPTNPALREEMRIQFNDMNSALTTAIPLFAVQNYQVPLLSVYVQAANLHLSVLRDVLVFGQRWGFDAATINSRYNDLTRLIGNYTDHAVRWYNTGLERVWGPDSRDWIRYNQFRRELTLTVLDIVSLFPNYDSRTYPIRTVSQLTREIYTNPVLENFDGSFRGSAQGIEGSIRSPHLMDILNSITIYTDAHRGEYYWSGHQIMASPVGFSGPEFTFPLYGTMGNAAPQQRIVAQLGQGVYRTLSSTLYRRPFNIGINNQQLSVLDGTEFAYGTSSNLPSAVYRKSGTVDSLDEIPPQNNNVPPRQGFSHRLSHVSMFRSGFSNSSVSIIRAPMFSWIHRSAEFNNIIPSSQITQIPLTKSTNLGSGTSVVKGPGFTGGDILRRTSPGQISTLRVNITAPLSQRYRVRIRYASTTNLQFHTSIDGRPINQGNFSATMSSGSNLQSGSFRTVGFTTPFNFSNGSSVFTLSAHVFNSGNEVYIDRIEFVPAEVTFEAEYDLERAQKAVNELFTSSNQIGLKTDVTDYHIDQVSNLVECLSDEFCLDEKKELSEKVKHAKRLSDERSLLQDPNFRGINRQLDRGWRGSTDITIQGGDDVFKENYVTLLGTFDECYPTYLYQKIDESKLKAYTRYQLRGYIEDSQDLEIYLIRYNAKHETVNVPGTGSLWPLSAPSPIGKCAHHSHHFSLDIDVGCTDLNEDLGVWEIFKIKTQDGHARLGNLEFLEEKPLVGEALARVKRAEKKWRDKREKLEWETNIVYKEAKESVDALFVNSQYDRLQADTNIAMIHAADKRVHSIREAYLPELSVIPGVNAAIFEELEGRIFTAFSLYDARNVIKNGDFNNGLSCWNVKGHVDVEEQNNHRSVLVVPEWEAEVSQEVRVCPGRGYILRVTAYKEGYGEGCVTIHEIENNTDELKFSNCVEEEVYPNNTVTCNDYTATQEEYEGTYTSRNRRYDGAYESNFSVPADYASAYEEKAYTDGRRDNPCESNRGYGDYTPLPAGYVTKELECFPETDKVWIEIGETEGTFIVDSVELLLMEE

SEQ ID NO: 82 - protein, 1154 aa, Bacillus thuringiensis LS-R-30
MDNNPNINECIPYNCLSNPEVEVLGGERIETGYTPIDISLSLTQFLLSEFVPGAGFVLGLVDIIWGIFGPSQWDAFLVQIEQLINQRIEEFARNQAISRLEGLSNLYQIYAESFREWEADPTNPALREEMRIQFNDMNSALTTAIPLFAVQNYQVPLLSVYVQAANLHLSVLRDVSVFGQRWGFDAATINSRYNDLTRLIGNYTDHAVRWYNTGLERVWGPDSRDWIRYNQFRRELTLTVLDIVSLFPNYDSRTYPIRTVSQLTREIYTNPVLENFDGSFRGSAQGIEGSIRSPHLMDILNSITIYTDAHRGEYYWSGHQIMASPVGFSGPEFTFPLYGTMGNAAPQQRIVAQLGQGVYRTLSSTLYRRPFNIGINNQQLSVLDGTEFAYGTSSNLPSAVYRKSGTVDSLDEIPPQNNNVPPRQGFSHRLSHVSMFRSGFSNSSVSIIRAPMFSWIHRSAEFNNIIPSSQITQIPLTKSTNLGSGTSVVKGPGFTGGDILRRTSPGQISTLRVNITAPLSQRYRVRIRYASTTNLQFHTSIDGRPINQGNFSATMSSGSNLQSGSFRTVGFTTPFNFSNGSSVFTLSAHVFNSGNEVYIDRIEFVPAEVTFEAEYDLERAQKAVNELFTSSNQIGLKTDVTDYHIDQVSNLVECLSDEFCLDEKKELSEKVKHAKRLSDERNLLQDPNFRGINRQLDRGWRGSTDITIQGGDDVFKENYVTLLGTFDECYPTYLYQKIDESKLKAYTRYQLRGYIEDSQDLEIYLIRYNAKHETVNVPGTGSLWPLSAPSPIGKCAHHSHHFSLDIDVGCTDLNEDLGVWVIFKIKTQDGHARLGNLEFLEEKPLVGEALARVKRAEKKWRDKREKLEWETNIVYKEAKESVDALFVNSQYDRLQADTNIAMIHAADKRVHSIREAYLPELSVIPGVNAAIFEELEGRIFTAFSLYDARNVIKNGDFNNGLSCWNVKGHVDVEEQNNHRSVLVVPEWEAEVSQEVRVCPGRGYILRVTAYKEGYGEGCVTIHEIENNTDELKFSNCVEEEVYPNNTVTCNDYTATQEEYEGTYTSRNRGYDGAYESNSSVPADYASAYEEKAYTDGRRDNPCESNRGYGDYTPLPAGYVTKELEYFPETDKVWIEIGETEGTFIVDSVELLLME

SEQ ID NO: 83 - protein, 1155 aa, Bacillus thuringiensis serovar kurstaki
  misc_feature: Xaa is Ala, Arg, Asn, Asp, Asx, Cys, Glu, Gln, Glx, Gly, His, Ile, Leu, Lys, Met, Phe, Pro, Ser, Thr, Trp, Tyr, or Val.
MDNNPNINECIPYNCLSNPEVEVLGGERIETGYTPIDISLSLTQFLLSEFVPGAGFVLGLVDIIWGIFGPSQWDAFLVQIEQLINQRIEEFARNQAISRLEGLSNLYQIYAESFREWEADPTNPALREEMRIQFNDMNSALTTAIPLFAVQNYQVPLLSVYVQAANLHLSVLRDVSVFGHRWGFDAATINSRYNDLTRLIGNYTDHAVRWYNTGLERVWGPDSRDWIRYNQFRRELTLTVLDIVSLFPNYDSRTYPIRTVSQLTREIYTNPVLENFDGSFRGSAQGIEGSIRSPHLMDILNSITIYTDAHRGEYYWSGHQIMASPVGFSGPESTFPLYGTMGNAAPQQRIVAQLGQGVYRTLSSTLYRRPFNIGINNQQLSVLDGTEFAYGTSSNLPSAVYRKSGTVDSLDEIPPQNNNVPPRQGFSHRLSHVSMFRSGFSNSSVSIIRAPMFSWIHRSAEFNNIIPSSQITQIPLTKSTNLGSGTSVVKAPGFTGGDILRRTSPGQISTLRVNITAPLSQRYRVRIRYASTTNLQFHTSIDGRPINQGNFSATMSSGSNLQSGSFRTVGFTTPFNFSNGSSVFTLSAHVFNSGNEVYIDRIEFVPAEVTFEAEYDLERAQKAVNELFTSSNQIGLKTDVTDYHIDQVSNLVECLSDEFCLDEKKELSEKVKHAKRLSDERNLLQDPNFRGINRQLDRGWRGSTDITIQGGDDVFKENYVTLLGTFDECYPTYLYQKIDESKLKAYTRYQLRGYIEDSQDLDIYLIRYNAKHETVNVPGTGSLWPLSAPSPIGKCAHHSHHFSLDIDVGCTDLNEDLGVWVIFKIKTQDGHARLGNLEFLEEKPLVGEALARVKRAEKKWRDKREKLEWETNIVYKEAKESVDALFVNSQYDRLQADTNIAMIHAADERVHSIREAYLPELSVIPGVNAAIFEELEGRIFTAFSLYDARNVIKNGDFNNGLSCWNVKGHVDVEEQNNHRSVLVVPEWEAEVSQEVRVCPGRGYILRVTAYKEGYGEGCVTIHEIENNTDEPKFSYCVEEEVYPNNTVTCNDYTATQEEYEGTYTSRNRGYDGAYESNSSVPADYASAYEEKAYTDGRRDNPCESNRGYGDYTPLPAGYVTKELEYFPETDKVWIEIGETEGTFIVDSVELLLMEE

SEQ ID NO: 84 - protein, 1155 aa, Bacillus thuringiensis kurstaki HD1; identical to SEQ ID NO: 69

SEQ ID NO: 85 - protein, 1155 aa, Bacillus thuringiensis kurstaki HD1; identical to SEQ ID NO: 69

SEQ ID NO: 86 - protein, 1155 aa, Bacillus thuringiensis berliner 1715
MDNNPNINECIPYNCLSNPEVEVLGGERIETGYTPIDISLSLTQFLLSEFVPGAGFVLGLVDIIWGIFGPSQWDAFLVQIEQLINQRIEEFARNQAISRLEGLSNLYQIYAESFREWEADPTNPALREEMRIQFNDMNSALTTAIPLFAVQNYQVPLLSVYVQAANLHLSVLRDVSVFGQRWGFDAATINSRYNDLTRLIGNYTDHAVRWYNTGLERVWGPDSRDWIRYNQFRRELTLTVLDIVSLFPNYDSRTYPIRTVSQLTREIYTNPVLENFDGSFRGSAQGIEGSIRSPHLMDILNSITIYTDAHRGEYYWSGHQIMASPVGFSGPEFTFPLYGTMGNAAPQQRIVAQLGQGVYRTLSSTLYRRPFNIGINNQQLSVLDGTEFAYGTSSNLPSAVYRKSGTVDSLDEIPPQNNNVPPRQGFSHRLSHVSMFRSGFSNSSVSIIRAPMFSWIHRSAEFNNIIPSSQITQIPLTKSTNLGSGTSVVKGPGFTGGDILRRTSPGQISTLRVNITAPLSQRYRVRIRYASTTNLQFHTSIDGRPINQGNFSATMSSGSNLQSGSFRTVGFTTPFNFSNGSSVFTLSAHVFNSGNEVYIDRIEFVPAEVTFEAEYDLERAQKAVNELFTSSNQIGLKTDVTDYHIDQVSNLVECLSDEFCLDEKKELSEKVKHAKRLSDERNLLQDPNFRGINRQLDRGWRGSTDITIQGGDDVFKENYVTLLGTFDECYLTYLYQKIDESKLKAYTRYQLRGYIEDSQDLEIYLIRYNAKHETVNVPGTGSLWRLSAPSPIGKCAHHSHHFSLDIDVGCTDLNEDLGVWVIFKIKTQDGHARLGNLEFLEEKPLVGEALARVKRAEKKWRDKREKLEWETNIVYKEAKESVDALFVNSQYDRLQADTNIAMIHAADKRVHSIREAYLPELSVIPGVNAAIFEELEGRIFTAFSLYDARNVIKNGDFNNGLSCWNVKGHVDVEEQNNHRSVLVVPEWEAEVSQEVRVCPGRGYILRVTAYKEGYGEGCVTIHEIENNTDELKFSNCVEEEVYPNNTVTCNDYTATQEEYEGTYTSRNRGYDGAYESNSSVPADYASAYEEKAYTDGRRDNPCESNRGYGDYTPLPAGYVTKELEYFPETDKVWIEIGETEGTFIVDSVELLLMEE

SEQ ID NO: 87 - protein, 1155 aa, Bacillus thuringiensis kurstaki NRD-12
MDNNPNINECIPYNCLSNPEVEVLGGERIETGYTPIDISLSLTQFLLSEFVPGAGFVLGLVDIIWGIFGPSQWDAFLVQIEQLINQRIEEFARNQAISRLEGLSNLYQIYAESFREWEADPTNPALREEMRIQFNDMNSALTTAIPLFAVQNYQVPLLSVYVQAANLHLSVLRDVSVFGQRWGFDAATINSRYNDLTRLIGNYTDHAVRWYNTGLERVWGPDSRDWIRYNQFRRELTLTVLDIVSLFPNYDSRTYPIRTVSQLTREIYTNPVLENFDGSFRGSAQGIEGSIRSPHLMDILNSITIYTDAHRGEYYWSGHQIMASPVGFSGPEFTFPLYGTMGNAAPQQRIVAQLGQGVYRTLSSTLYRRPFNIGINNQQLSVLDGTEFAYGTSSNLPSAVYRKSGTVDSLDEIPPQNNNVPPRQGFSHRLSHVSMFRSGFSNSSVSIIRAPMFSWIHRSANFNNIIPSSQITQIPLTKSTNLGSGTSVVKGPGFTGGDILRRTSPGQISTLRVNITAPLSQRYRVRIRYASTTNLQFHTSIHGRPINQGNFSATMSSGSNLQSGSFRHLGFTTPFNFSNGSSVFTLSAHVFNSGNEVYIDRIEFVPAEVTFEAEYDLERAQKAVNELFTSSNQIGLKTDVTDYHIDQVSNLVECLSDEFCLDEKEELSEKVKHANGLSDERNLLQDPNFRGINRQLDRGWRGSTDITIQGGDDVFKENYVTLLGTFDECYPTYLYQKIDESKLKAYTRYQLRGYIEDSQDLEIYLIRYNAKHETVNVPGTGSLWPLSAPSPIGKCAHHSHHFSLDIDVGCTDLNEDLGVWVIFKIKTQDGHARLGILEFLEEKPLVGEALARVKRAEKKWRDKREKLEWETNIVYKEAKESVDALFVNSQYDRLQADTNIAMIHAADKRVHSIREAYLPELSVIPGVNAAIFEELEGRIFTAFSLYDARNVIKNGDFNNGLSCWNVKGHVDVEEQNNHRSVLVVPEWEAEVSQEVRVCPGRGYILRVTAYKEGYGTGCVTIHEIENNTDELKFSNCVEEEVYPNNTVTCNDYTATQEEYGGTYTSRNRGYDGAYESNSSVPADYASAYEEKAYTDGRRDNPCESNRGYGDYTPLPAGYVTKELEYFPETDKVWIEIGETEGTFIVDSVELLLMEE

SEQ ID NO: 88 - protein, 1155 aa, Bacillus thuringiensis aizawai IC1
MDNNPNINECIPYNCLSNPEVEVLGGERIETGYTPIDISLSLTQFLLSEFVPGAGFVLGLVDIIWGIFGPSQWDAFLVQIEQLINQRIEEFARNQAISRLEGLSNLYQIYAESFREWEADPTNPALREEMRIQFNDMNSALTTAIPLFAVQNYQVPLLSVYVQAANLHLSVLRDVSVFGQRWGFDAATINSRYNDLTRLIGNYTDHAVRWYNTGLERVWGPDSRDWIRYNQFRRELTLTVLDIVSLFPNYDSRTYPIRTVSQLTREIYTNPVLENFDGSFRGSAQGIEGSIRSPHLMDILNSITIYTDAHRGEYYWSGHQIMASPVGFSGPEFTFPLYGTMGNAAPQQRIVAQLGQGVYRTLSSTLYRRPFNIGINNQQLSVLDGTEFAYGTSSNLPSAVYRKSGTVDSLDEIPPQNNNVPPRQGFSHRLSHVSMFRSGFSNSSVSIIRPPMFSWIHRSAEFNNIIPSSQITQIPLTKSTNLGSGTSVVKGPGFTGGDILRRTSPGQISTLRVNITAPLSQRYRVRIRYASTTNLQLHTSIDGRIINQGNFSATMSSGSNLQSGSFRIVGFTTPFNFSNGSSVFTLSAHVFNSGNEVYIDRIEFVPAEVTFEAEYDLERAQKAVNELFTSSNQIGLKTDVTDYHIDQVSNLVECLSDEFCLDEKKELSEKVKHAKRLSDERNLLQDPNFRGINRQLDRGWRGSTDITIQGGDDVFKENYVTLLGTFDECYLTYLYQKIDESKLKAYTRYQLRGYIEDSQDLEIYLIRYNAKHETVNVPGTGSLWRLSAPSPIGKCAHHSHHFSLDIDVGCTDLNEDLGVWVIFKIKTQDGHARLGNLEFLEEKPLVGEALARVKRAEKKWRDKREKLEWETNIVYKEAKESVDALFVNSQYDRLQADTNIAMIHAADKRVHSIREAYLPELSVIPGVNAAIFEELEGRIFTAFSLYDARNVIKNGDFNNGLSCWNVKGHVDVEEQNNHRSVLVVPEWEAEVSQEVRVCPGRGYILRVTAYKEGYGEGCVTIHEIENNTDELKFSNCVEEEVYPNNTVTCNDYTATQEEYEGTYTSRNRGYDGAYESNSSVPADYASAYEEKAYTDGRRDNPCESNRGYGDYTPLPAGYVTKELEYFPETDKVWIEIGETEGTFIVDSVELLLMEE

SEQ ID NO: 89 - protein, 1155 aa, Bacillus thuringiensis aizawai IPL7
MDNNPNINECIPYNCLSNPEVEVLGGERIETGYTPIDISLSLTQFLLSEFVPGAGFVLGLVDIIWGIFGPSQWDAFLVQIEQLINQRIEEFARNQAISRLEGLSNLYQIYAESFREWEADPTNPALREEMRIQFNDMNSALTTAIPLFAVQNYQVPLLSVYVQAANLHLSVLRDVSVFGQRWGFDAATINSRYNDLTRLIGNYTDHAVRWYNTGLERVWGPDSRDWIRYNQFRRELTLTVLDIVSLFPNYDSRTYPIRTVSQLTREIYTNPVLENFDGSFRALAQGIEGSIRSPHLMDILNSITIYTDAHRGEYYWSGHQIMASPVGFSGPEFTFPLYGTMGNAAPQQRIVAQLGQGVYRTLSSTLYRRPFNIGINNQQLSVLDGTEFAYGTSSNLPSAVYRKSGTVDSLDEIPPQNNNVPPRQGFSHRLSHVSMFRSGFSNSSVSIIRAPMFSWIHRSAEFNNIIPSSQITQIPLTKSTNLGSGTSVVKGPGFTGGDILRRTSPGQISTLRVNITAPLSQRYRVRIRYASTTNLQFHTSIDGRPINQGNFSATMSSGSNLQSGSFRTVGFTTPFNFSNGSSVFTLSAHVFNSGNEVYIDRIEFVPAEVTFEAEYDLERAQKAVNELFTSSNQIGLKTDVTDYHIDQVSNLVECLSDEFCLDEKKELSEKVKHAKRLSDERNLLQDPNFRGINRQLDRGWRGSTDITIQGGDDVFKENYVTLLGTFDECYPTYLYQKIDESKLKAYTRYQLRGYIEDSQDLEIYLIRYNAKHETVNVPGTGSLWPLSAPSPIGKCAHHSHHFSLDIDVGCTDLNEDLGVWVIFKIKTQDGHARLGNLEFLEEKPLVGEALARVKRAEKKWRDKREKLEWETNIVYKEAKESVDALFVNSQYDRLQADTNIAMIHAADKRVHSIREAYLPELSVIPGVNAAIFEELEGRIFTAFSLYDARNVIKNGDFNNGLSCWNVKGHVDVEEQNNQRSVLVVPEWEAEVSQEVRVCPGRGYILRVTAYKEGYGEGCVTIHEIENNTDELKFSNFVEEEVYPNNTVTCNDYTATQEEYEGTYTSRNRGYDGAYESNSSVPADYASAYEEKAYTDGRRDNPCESNRGYGDYTPLPAGYVTKELEYFPETDKVWIEIGETEGTFIVDSVELLLMEE

SEQ ID NO: 90 - protein, 1155 aa, Bacillus thuringiensis aizawai HD133; identical to SEQ ID NO: 69

SEQ ID NO: 91 - protein, 1118 aa, Bacillus thuringiensis kunthala RX24
MDNNLNINECIPYNCLSNPEVEVLGGERIETGYTPIDISLSLTQFLLSEFVPGAGFVLGLVDIIWGIFGPSQWDAFLVQIEQLINQRIEEFARNQAISRLEGLSNLYQIYAESFREWEADPTNPALREEMRIQFNDMNSALTTAIPLFAVQNYQVPLLSVYVQAANLHLSVLRDVSVFGQRWGFDAATINSRYNDLTRLIGNYTDHAVRWYNTGLERVWGPDSRDWIRYNQFRRELTLTVLDIVSLFPNYDSRTYPIRTVSQLTREIYTNPVLENFDGSFRGSAQGIEGSIRSPHLMDILNSITIYTDAHRGEYYWSGHQIMASPVGFSGPEFTFPLYGTMGNAAPQQRIVAQLGQGVYRTLSSTLYRRPFNIGINNQQLSVLDGTEFAYGTSSNLPSAVYRKSGTVDSLDEIPPQNNNVPPRQGFSHRLSHVSMFRSGFSNSSVSIIRAPMFSWIHRSAEFNNIIPSSQITQIPLTKSTNLGSGTSVVKGPGFTGGDILRRTSPGQISTLRVNITAPLSQRYRVRIRYASTTNLQFHTSIDGRPINQGNFSATMSSGSNLQSGAFMTVGFTTPFNFSNGSSVFTLSAHVFNSGNEVYIDRIEFVPAEVTFEAEYDLERAQKAVNELFTSSNQIGLKTDVTDYHIDQVSNLVECLSDEFCLDEKKELSEKVKHAKRLSDERNLLQDPNFRGINRQLDRGWRGSTDITIQGGDDVFKENYLTLLGTFDECFQRIYIKKVDESKFKAYTRDQLRGYIEDSQDLEIYLIRYNAKHETVNVPGTGSLWPLSAPSPIGKCAHHSHHFSLDIDVGCTDLNEDLGVWVIFKIKTQDGHARLGNLEFLEEKPLVGEALARVKRAEKKWRDKREKLEWETNIVYKEAKESVDALFVNSQYDRLQADTNIAMIHAADKRVHSIREAYLPELSVIPGVNAAIFEELEGRIFTAFSLYDARNVIKNGDFNNGLSCWNVKGHVDVEEQNNHRSVLVVPEWEAEVSQEVRVCPGRGYILRVTAYKEGYGEGCVTIHEIENNTDELKFSNCVEEEVYPNNTVTCKIILRLKKNMRVRTLLVIEDMTEPMKAILLYQLIMHQPMKKKHIQMDEETILVNLTEDMGITHHYQLAM

SEQ ID NO: 92 - protein, 1118 aa, Bacillus thuringiensis kunthala RX28
MDNNPNINECIPYNCLSNPEVEVLGGERIETGYTPIDISLSLTQFLLSEFVPGAGFVLGLVDIIWGIFGPSQWDAFLVQIEQLINQRIEEFARNQAISRLEGLSNLYQIYAESFREWEADPTNPALREEMRIQFNDMNSALTTAIPLLAVQNYQVPLLSVYVQAANLHLSVLRDVSVFGQRWGFDAATINSRYNDLTRLIGNYTDYAVRWYNTGLERVWGPDSRDWVRYNQFRREITLTVLDIVALFPNYDSRTYPIRTVSQLTREIYTNPVLENFDGSFRGSAQGTERSIRSPHLMDILNSITIYRMHIEDIIIGQGIKKRLLLEGFQGQNSLFLYLGRGEMQLHPNRLLLNKVRACIEHYRPLYIEDLFKEGINNQQLSVLDGTEFAYGTSSNLPSAVYRKSGTVDSLDEIPPQNNNVPPRQGFSHRLSHVSMFRSGFSNSSVSIIRAPMFSWIHRSAEFNNIIPSSQITQIPLTKSTNLGSGTSVVKGPGFTGGDILRRTSPGQISTLRVNITAPLSQRYRVRIRYASTTNLQFHTSIDGRPINQGNFSATMSSGSNLQSGSFRTVGFTTPFNFSNGSSVFTLSAHVFNSGNEVYIDRIEFVPAEVTFEAEYDLERAQKAVNELFTSSNQIGLKTDVTDYHIDQVSNLVECLSDEFCLDEKQELSEKVKHAKRLSDERNLLQDPNFRGINRQLDRGWRGSTDITIQGGDDVFKENYVTLLGTFDECFQRIYIKKVDESKFKAYTRDQLRGYIEDSQDLEIYLIRYNAKHETVNVPGTGSLWPLSAPSPIGKCAHHSHHFSLDIDVGCTDLNEDLGVWVIFKIKTQDGHARLGNLEFLEEKPLVGEALARVKRAEKKWRDKREKLEWETNIVYKEAKESVDALFVNSQYDRLQADTNIAMIHAADKRVHSIREAYLPELSVIPGVNAAIFEELEGRIFTAFSLYDARNVIKNGDFNNGLSCWNVKGHVDVEEQNNHRSVLVVPEWEAEVSQEVRVCPGRGYILRVTAYKEGYGEGCVTIHEIENNTDELKFSNCVEEEVYPNNTVTCKIILRLKKNMRVRTLLVIEDMTEPMKAILLYQLIMHQPMKKKHIQMDEETILVNLTEDMGITHHYQLAM

SEQ ID NO: 93 - protein, 373 aa, Bacillus thuringiensis ly4a3
RDMTVIVLDIVSLFPNYDSRTYPIRTVSQLTREIYTNPVLENFDGSFRGSAQGIEGSIRSPHLMDILNSITIYTDAHRGEYYWSGHQIMASPVGFSGPEFTFPLYGTMGNAAPQQRIVAQLGQGVYRTLSSTLYRRPFNIGINNQQLSVLDGTEFAYGTSSNLPSAVYRKSGTVDSLDEIPPQNNNVPPRQGFSHRLSHVSMFRSGFSNSSVSIIRAPMFSWIHRSAEFNNIIPSSQITQIPLTKSTNLGSGTSVVKGPGFTGGDILRRTSPGQISTLRVNITAPLSQRYRVRIRYASTTNLQFHTSIDGRPINQGNFSATMSSGSNLQSGSFRTVGFTTPFNFSNGSSVFTLSAHVFNSGNEVYIDKIEFIP

SEQ ID NO: 94 - protein, 1178 aa, Bacillus thuringiensis kurstaki HD73
MDNNPNINECIPYNCLSNPEVEVLGGERIETGYTPIDISLSLTQFLLSEFVPGAGFVLGLVDIIWGIFGPSQWDAFLVQIEQLINQRIEEFARNQAISRLEGLSNLYQIYAESFREWEADPTNPALREEMRIQFNDMNSALTTAIPLFAVQNYQVPLLSVYVQAANLHLSVLRDVSVFGQRWGFDAATINSRYNDLTRLIGNYTDYAVRWYNTGLERVWGPDSRDWVRYNQFRRELTLTVLDIVALFPNYDSRRYPIRTVSQLTREIYTNPVLENFDGSFRGSAQGIERSIRSPHLMDILNSITIYTDAHRGYYYWSGHQIMASPVGFSGPEFTFPLYGTMGNAAPQQRIVAQLGQGVYRTLSSTLYRRPFNIGINNQQLSVLDGTEFAYGTSSNLPSAVYRKSGTVDSLDEIPPQNNNVPPRQGFSHRLSHVSMFRSGFSNSSVSIIRAPMFSWIHRSAEFNNIIASDSITQIPAVKGNFLFNGSVISGPGFTGGDLVRLNSSGNNIQNRGYIEVPIHFPSTSTRYRVRVRYASVTPIHLNVNWGNSSIFSNTVPATATSLDNLQSSDFGYFESANAFTSSLGNIVGVRNFSGTAGVIIDRFEFIPVTATLEAEYNLERAQKAVNALFTSTNQLGLKTNVTDYHIDQVSNLVTYLSDEFCLDEKRELSEKVKHAKRLSDERNLLQDSNFKDINRQPERGWGGSTGITIQGGDDVFKENYVTLSGTFDECYPTYLYQKIDESKLKAFTRYQLRGYIEDSQDLEIYLIRYNAKHETVNVPGTGSLWPLSAQSPIGKCGEPNRCAPHLEWNPDLDCSCRDGEKCAHHSHHFSLDIDVGCTDLNEDLGVWVIFKIKTQDGHARLGNLEFLEEKPLVGEALARVKRAEKKWRDKREKLEWETNIVYKEAKESVDALFVNSQYDQLQADTNIAMIHAADKRVHSIREAYLPELSVIPGVNAAIFEELEGRIFTAFSLYDARNVIKNGDFNNGLSCWNVKGHVDVEEQNNQRSVLVVPEWEAEVSQEVRVCPGRGYILRVTAYKEGYGEGCVTIHEIENNTDELKFSNCVEEEIYPNNTVTCNDYTVNQEEYGGAYTSRNRGYNEAPSVPADYASVYEEKSYTDGRRENPCEFNRGYRDYTPLPVGYVTKELEYFPETDKVWIEIGETEGTFIVDSVELLLMEE

SEQ ID NO: 95 - protein, 1178 aa, Bacillus thuringiensis kurstaki YBT-1520; identical to SEQ ID NO: 94

SEQ ID NO: 96 - protein, 1178 aa, Bacillus thuringiensis
MDNNPNINECIPYNCLSNPEVEVLGGERIETGYTPIDISLSLTQFLLSEFVPGAGFVLGLVDIIWGIFGPSQWDAFLVQIEQLINQRIEEFARNQAISRLEGLSNLYQIYAESFREWEADPTNPALREEMRIQFNDMNSALTTAIPLLAVQNYQVPLLSVYVQAANLHLSVLRDVSVFGQRWGFDAATINSRYNDLTRLIGNYTDYAVRWYNTGLERVWGPDSRDWVRYNQFRRELTLTVLDIVALFPNYDSRRYPIRTVSQLTREIYTNPVLENFDGSFRGSAQGIERSIRSPHLMDILNSITIYTDAHRGYYYWSGHQIMASPVGFSGPEFTFPLYGTMGNAAPQQRIVAQLGQGVYRTLSSTFYRRPFNIGINNQQLSVLDGTEFAYGTSSNLPSAVYRKSGTVDSLDEIPPQNNNVPPRQGFSHRLSHVSMFRSGSSNSSVSIIRAPMFSWIHRSAEFNNIIASDSITQIPAVKGNFLFNGSVISGPGFTGGDLVRLNSSGNNIQNRGYIEVPIHFPSTSTRYRVRVRYASVTPIHLNVNWGNSSIFSNTVPATATSLDNLQSSDFGYFESANAFTSSLGNIVGVRNFSGTAGVIIDRFEFIPVTATLEAEYNLERAQKAVNALFTSTNQLGLKTNVTDYHIDQVSNLVTYLSDEFCLDEKRELSEKVKHAKRLSDERNLLQDSNFKDINRQPERGWGGSTGITIQGGDDVFKENYVTLSGTFDECYPTYLYQKIDESKLKAFTRYQLRGYIEDSQDLEIYLIRYNAKHETVNVPGTGSLWPLSAQSPIGKCGEPNRCAPHLEWNPDLDCSCRDGEKCAHHSHHFSLDIDVGCTDLNEDLGVWVIFKIKTQDGHARLGNLEFLEEKPLVGEALARVKRAEKKWRDKREKLEWETNIVYKEAKESVDALFVNSQYDQLQADTNIAMIHAADKRVHSIREAYLPELSVIPGVNAAIFEELEGRIFTAFSLYDARNVIKNGDFNNGLSCWNVKGHVDVEEQNNQRSVLVVPEWEAEVSQEVRVCPGRGYILRVTAYKEGYGEGCVTIHEIENNTDELKFSNCVEEEIYPNNTVTCNDYTVNQEEYGGAYTSRNRGYNEAPSVPADYASVYEEKSYTDGRRENPCEFNRGYRDYTPLPVGYVTKELEYFPETDKVWIEIGETEGTFIVDSVELLLMEE

SEQ ID NO: 97 - protein, 723 aa, Bacillus thuringiensis kurstaki HD1
MDNNPNINECIPYNCLSNPEVEVLGGERIETGYTPIDISLSLTQFLLSEFVPGAGFVLGLVDIIWGIFGPSQWDAFLVQIEQLINQRIEEFARNQAISRLEGLSNLYQIYAESFREWEADPTNPALREEMRIQFNDMNSALTTAIPLLAVQNYQVPLLSVYVQAANLHLSVLRDVSVFGQRWGFDAATINSRYNDLTRLIGNYTDYAVRWYNTGLERVWGPDSRDWVRYNQFRRELTLTVLDIVALFPNYDSRRYPIRTVSQLTREIYTNPVLENFDGSFRGSAQGIERSIRSPHLMDILNSITIYTDAHRGYYYWSGHQIMASPVGFSGPEFTFPLYGTMGNAAPQQRIVAQLGQGVYRTLSSTFYRRPFNIGINNQQLSVLDGTEFAYGTSSNLPSAVYRKSGTVDSLDEIPPQNNNVPPRQGFSHRLSHVSMFRSGSSSSVSIIRAPMFSWIHRSAEFNNIIASDSITQIPAVKGNFLFNGSVISGPGFTGGDLVRLNSSGNNIQNRGYIEVPIHFPSTSTRYRVRVRYASVTPIHLNVNWGNSSIFSNTVPATATSLDNLQSSDFGYFESANAFTSSLGNIVGVRNFSGTAGVIIDRFEFIPVTATLEAEYNLERAQKAVNALFTSTNQLGLKTNVTDYHIDQVSNLVTYLSDEFCLDEKRELSEKVKHAKRLSDERNLLQDSNFKDINRQPERGWGGSTGITIQGGDDVFKENYVTLS

SEQ ID NO: 98 - protein, 1177 aa, Bacillus thuringiensis Ly30
MDNNPNINECIPYNCLSNPEVEVLGGERIETGYTPIDISLSLTQFLLSEFVPGAGFVLGLVDIIWGIFGPSQWDAFLVQIEQLINQRIEEFARNQAISRLEGLSNLYQIYAESFREWEADPTNPALREEMRIQFNDMNSALTTAIPLLAVQNYQVPLLSVYVQAANLHLSVLRDVSVFGQRWGFDAATINSRYNDLTRLIGNYTDYAVRWYNTGLERVWGPDSRDWVRYNQFRRELTLTVLDIVALFPNYDSRRYPIRTVSQLTREIYTNPVLENFDGSFRGSAQGIERSIRSPHLMDILNSITIYTDAHRGYYYWSGHQIMASPVGFSGPEFTFPLYGTMGNAAPQQRIVAQLGQGVYRTLSSTFYRRPFNIGINNQQLSVLDGTEFAYGTSSNLPSAVYRKSGTVDSLDEIPPQNNNVPPRQGFSHRLSHVSMFRSGSSSSVSIIRAPMFSWIHRSAEFNNIIASDSITQIPAVKGNFLFNGSVISGPGFTGGDLVRLNSSGNNIQNRGYIEVPIHFPSTSTRYRVRVRYASVTPIHLNVNWGNSSIFSNTVPATATSLDNLQSSDFGYFESANAFTSSLGNIVGVRNFSGTAGVIIDRFEFIPVTATLEAEYNLERAQKAVNALFTSTNQLGLKTNVTDYHIDQVSNLVTYLSDEFCLDEKRELSEKVKHAKRLSDERNLLQDSNFKDINRQPERGWGGSTGITIQGGDDVFKENYVTLSGTFDECYPTYLYQKIDESKLKAFTRYQLRGYIEDSQDLEIYLIRYNAKHETVNVPGTGSLWPLSAQSPIGKCGEPNRCAPHLEWNPDLDCSCRDGEKCAHHSHHFSLDIDVGCTDLNEDLGVWVIFKIKTQDGHARLGNLEFLGEKPLVGEALARVKRAEKKWRDKREKLEWETNIVYKEAKESVDALFVNSQYDQLQADTNIAMIHAADKRVHSIREAYLPELSVIPGVNAAIFEELEGRIFTAFSLYDARNVIKNGDFNNGLSCWNVKGHVDVEEQNNQRSVLVVPEWEAEVSQEVRVCPGRGYILRVTAYKEGYGEGYVTIHEIENNTDELKFSNCVEEEIYPNNTVTCNDYTVNQEEYGGAYTSRSRGYNEAPSVPADYASVYEEKSYTDGRRENPCEFNRGYRDHTPLPVGYVTKELEYFPETDKVWIEIGETEGTFIVDSVELLLMEE

SEQ ID NO: 99 - protein, 1177 aa, Bacillus thuringiensis from Taiwan
MDNNPNINECIPYNCLSNPEVEVLGGERIETGYTPIDISLSLTQFLLSEFVPGAGFVLGLVDIIWGIFGPSQWDAFLVQIEQLINQRIEEFARNQAISRLEGLSNLYQIYAESFREWEADPTNPALREEMRIQFNDMNSALTTAIPLFAVQNYQVPLLSVYVQAANLHLSVLRDVSVFGQRWGFDAATINSRYNDLTRLIGNYTDYAVRWYNTGLERVWGPDSRDWVRYNQFRRELTLTVLDIVALFPNYDSRRYPIRTVSQLTREIYTNPVLENFDGSFRGSAQGIERSIRSPHLMDILNSITIYTDAHRGYYYWSGHQIMASPVGFSGPEFTFPLYGTMGNAAPQQRIVAQLGQGVYRTLSSTFYRRPFNIGINNQQLSVLDGTEFAYGTSSNLPSAVYRKSGTVDSLDEIPPQNNNVPPRQGFSHRLSHVSMFRSGSSSSVSIIRAPMFSWIHRSAEFNNIIASDSITQIPAVKGNFLFNGSVISGPGFTGGDLVRLNSSGNNIQNRGYIEVPIHFPSTSTRYRVRVRYASVTPIHLNVNWGNSSIFSNTVPATATSLDNLQSSDFGYFESANAFTSSLGNIVGVRNFSGTAGVIIDRFEFIPVTATLEAEYNLERAQKAVNALFTSTNQLGLKTNVTDYHIDQVSNLVTYLSDEFCLDEKRELSEKVKHAKRLSDERNLLQDSNFKDINRQPERGWGGSTGITIQGGDDVFKENYVTLSGTFDECYPTYLYQKIDESKLKAFTRYQLRGYIEDSQDLEIYLIRYNAKHETVNVPGTGSLWPLSAQSPIGKCGEPNRCAPHLEWNPDLDCSCRDGEKCAHHSHHFSLDIDVGCTDLNEDLGVWVIFKIKTQDGHARLGNLEFLEEKPLVGEALARVKRAEKKWRDKREKLEWETNIVYKEAKESVDALFVNSQYDQLQADTNIAMIHAADKRVHSIREAYLPELSVIPGVNAAIFEELEGRIFTAFSLYDARNVIKNGDFNNGLSCWNVKGHVDVEEQNNQRSVLVVPEWEAEVSQEVRVCPGRGYILRVTAYKEGYGEGCVTIHEIENNTDELKFSNCVEEEIYPNNTVTCNDYTVNQEEYGGAYTSRNRGYNEAPSVPADYASVYEEKSYTDGRRENPCEFNRGYRDYTPLPVGYVTKELEYFPETDKVWIEIGETEGTFIVDSVELLLMEE

SEQ ID NO: 100 - protein, 1178 aa, Bacillus thuringiensis H3
MDNNPNINECIPYNCLSNPEVEVLGGERIETGYTPIDISLSLTQFLLSEFVPGAGFVLGLVDIIWGIFGPSQWDAFLVQIEQLINQRIEEFARNQAISRLEGLSNLYQIYAESFREWEADPTNPALREEMRIQFNDMNSALTTAIPLFAVQNYQVPLLSVYVQAANLHLSVLRDVSVFGQRWGFDAATINSRYNDLTRLIGNYTDYAVRWYNTGLERVWGPDSRDWVRYNQFRRELTLTVLDIVALFPNYDSRRYPIRTVSQLTREIYTNPVLENFDGSFRGSAQGIERSIRSPHLMDILNSITIYTDAHRGYYYWSGHQIMASPVGFSGPEFTFPLYGTMGNAAPQQRIVAQLGQGVYRTLSSTLYRRPFNIGINNQQLSVLDGTEFAYGTSSNLPSAVYRKSGTVDSLDEIPPQNNNVPPRQGFSHRLSHVSMFRSGFSNSSVSIIRAPMFSWIHRSAEFNNIIASDSITQIPAVKGNFLFNGSVISGPGFTGGDLVRLNSSGNNIQNRGYIEVPIHFPSTSTRYRVRVRYASVTPIHLNVNWGNSSIFSNTVPATATSLDNLQSSDFGYFESANAFTSSLGNIVGVRNFSGTAGVIIDRFEFIPVTATLEAEYNLERAQKAVNALFTSTNQLGLKTNVTDYHIDQVSNLVTYLSDEFCLDEKRELSEKVKHAKRLSDERNLLQDSNFKDINRQPERGWGGSTGITIQGGDDVFKENYVTLSGTFDECYPTYLYQKIDESKLKAFTRYQLRGYIEDSQDLEIYLIRYNAKHETVNVPGTGSLWPLSTQSPIGKCGEPNRCAPHLEWNPDLDCSCRDGEKCAHHSHHFSLDIDVGCTDLNEDLGVWVIFKIKTQDGHARLGNLEFLEEKPLVGEALARVKRAEKKWRDKREKLEWETNIVYKEAKESVDALFVNSQYDQLQADTNIAMIHAADKRVHSIREAYLPELSVIPGVNAAIFEELEGRIFTAFSLYDARNVIKNGDFNNGLSCWNVKGHVDVEEQNNQRSVLVVPEWEAEVSQEVRVCPGRGYILRVTAYKEGYGEGCVTIHEIENNTDELKFSNCVEEEIYPNNTVTCNDYTVNQEEYGGAYTSRNRGYNEAPSVPADYASVYEEKSYTDGRRENPCEFNRGYRDYTPLPVGYVTKELEYFPETDKVWIEIGETEGTFIVDSVELLLMEE

SEQ ID NO: 101 - protein, 1177 aa, Bacillus thuringiensis kenyae HD549
MDNNPNINECIPYNCLSNPEVEVLGGERIETGYTPIDISLSLTQFLLSEFVPGAGFVLGLVDIIWGIFGPSQWDAFLVQIEQLINQRIEEFARNQAISRLEGLSNLYQIYAESFREWEADPTNPALREEMRIQFNDMNSALTTAIPLLAVQNYQVPLLSVYVQAANLHLSVLRDVSVFGQRWGFDAATINSRYNDLTRLIGNYTDYAVRWYNTGLERVWGPDSRDWVRYNQFRRELTLTVLDIVALFPNYDSRRYPIRTVSQLTREIYTNPVLENFDGSFRGSAQGIERSIRSPHLMDILNSITIYTDAHRGYYYWSGHQIMASPVGFSGPEFTFPLYGTMGNAAPQQRIVAQLGQGVYRTLSSTFYRRPFNIGINNQQLSVLDGTEFAYGTSSNLPSAVYRKSGTVDSLDEIPPQNNNVPPRQGFSHRLSHVSMFRSGSSSSVSIIRAPMFSWIHRSAEFNNIIASDSITQIPAVKGNFLFNGSVISGPGFTGGDLVRLNSSGNNIQNRGYIEVPIHFPSTSTRYRVRVRYASVTPIHLNVNWGNSSIFSNTVPATATSLDNLQSSDFGYFESANAFTSSLGNIVGVRNFSGTAGVIIDRFEFIPVTATLEAEYNLERAQKAVNALFTSTNQLGLKTNVTDYHIDQVSNLVTYLSDEFCLDEKRELSEKVKHAKRLSDERNLLQDSNFKDINRQPERGWGGSTGITIQGGDDVFKENYVTLSGTFDECYPTYLYQKIDESKLKAFTRYQLRGYIEDSQDLEIYLIRYNAKHETVNVPGTGSLWPLSAQSPIGKCGEPNRCAPHLEWNPDLDCSCRDGEKCAHHSHHFSLDIDVGCTDLNEDLGVWVIFKIKTQDGHARLGNLEFLEEKPLVGEALARVKRAEKKWRDKREKLEWETNIVYKEAKESVDALFVNSQYDQLQADTNIAMIHAADKRVHSIREAYLPELSVIPGVNAAIFEELEGRIFTAFSLYDARNVIKNGDFNNGLSCWNVKGHVDVEEQNNQRSVLVVPEWEAEVSQEVRVCPGRGYILRVTAYKEGYGEGCVTIHEIENNTDELKFSNCVEEEIYPNNTVTCNDYTVNQEEYGGAYTSRNRGYNEAPSVPADYASVYEEKSYTDGRRENPCEFNRGYRDYTPLPVGYVTKELEYFPETDKVWIEIGETEGTFIVDSVELLLMEE

SEQ ID NO: 102 - protein, 1177 aa, Bacillus thuringiensis SK-729
MDNNPNINECIPYNCLSNPEVEVLGGERIETGYTPIDISLSLTQFLLSEFVPGAGFVLGLVDIIWGIFGPSQWDAFLVQIEQLINQRIEEFARNQAISRLEGLSNLYQIYAESFREWEADPTNPALREEMRIQFNDMNSALTTAIPLLAVQNYQVPLLSVYVQAANLHLSVLRDVSVFGQRWGFDAATINSRYNDLTRLIGNYTDHAVRWYNTGLERVWGPDSRDWVRYNQFRRELTLTVLDIVALFPNYDSRRYPIRTVSQLTREIYTNPVLENFDGSFRGSAQGIERSIRSPHLMDILNSITIYTDAHRGYYYWSGHQIMASPVGFSGPEFTFPLYGTMGNAAPQQRIVAQLGQGVYRTLSSTFYRRPFNIGINNQQLSVLDGTEFAYGTSSNLPSAVYRKSGTVDSLDEIPPQNNNVPPRQGFSHRLSHVSMFRSGSSSSVSIIRAPMFSWIHRSAEFNNIIASDSITQIPAVKGNFLFNGSVISGPGFTGGDLVRLNSSGNNIQNRGYIEVPIHFPSTSTRYRVRVRYASVTPIHLYVNWGNSSIFSNTVPATATSLDNLQSSDFGYFESANAFTSSLGNIVGVRNFSGTAGVIIDRFEFIPVTATLEAEYNLERAQKAVNALFTSTNQLGLKTNVTDYHIDQVSNLVTCLSDEFCLDEKRELSEKVKHAKRLSDERNLLQDSNFKDINRQPERGWGGSTGITIQGGDDVFKENYVTLSGTFDECYPTYLYQKIDESKLKAFTRYQLRGYIEDSQDLEIYLIRYNAKHETVNVPGTGSLWPLSAQSPIGKCGEPNRFAPHLEWNPDLDCSCRDGEKCAHHSHHFSLDIDVGCTDLNEDLGVWVIFKIKTQDGHARLGNLEFLEEKPLVGEALARVKRAEKKWRDKREKLEWETNIVYKEAKESVDALFVNSQYDQLQADTNIAMIHAADKRVHSIREAYLPELSVIPGVNAAIFEELEGRIFTAFSLYDARNVIKNGDFNNGLSCWNVKGHVDVEEQNNQRSVLVVPEWEAEVSQEVRVCPGRGYILRVTAYKEGYGEGCVTIHEIENNTDELKFSNCVEEEIYPNNTVTCNDYTVNQEEYGGAYTSRNRGYNEAPSVPADYASVYEEKSYTDGRRENPCEFNRGYRDYTPLPVGYVTKELEYFPETDKVWIEIGETEGTFIVDSVESLLMEE

SEQ ID NO: 103 - protein, 1178 aa, Bacillus thuringiensis C-33
MDNNPNINECIPYNCLSNPEVEVLGGERIETGYTPIDISLSLTQFLLSEFVPGAGFVLGLVDIIWGIFGPSQWDAFLVQIEQLINQRIEEFARNQAISRLEGLSNLYQIYAESFREWEADPTNPALREEMRIQFNDMNSALTTAIPLFAVQNYQVLLLSVYVQAANLHLSVLRDVSVFGQRWGFDAATINSRYNDLTRLIGNYTDYAVRWYNTGLERVWGPDSRDWVRYNQFRRELTLTVLDIVALFPNYDSRRYPIRTVSQLTREIYTNPVLENFDGSFRGSAQGIERSIRSPHLMDILNSITIYTDAHRGYYYWSGHQIMASPVGFSGPEFTFPLYGTMGNAAPQQRIVAQLGQGVYRTLSSTLYRRPFNIGINNQQLSVLDGTEFAYGTSSNLPSAVYRKSGTVDSLDEIPPQNNNVPPRQGFSHRLSHVSMFRSGFSNSSVSIIRAPMFSWIHRSAEFNNIIASDSITQIPAVKGNFLFNGSVISGPGFTGGDLVRLNSSGNNIQNRGYIEVPIHFPSTSTRYRVRVRYASVTPIHLNVNWGNSSIFSNTVPATATSLDNLQSSDFGYFESANAFTSSLGNIVGVRNFSGTAGVIIDRFEFIPVTATLEAEYNLERAQKAVNALFTSTNQLGLKTNVTDYHIDQVSNLVTYLSDEFCLDEKRELSEKVKHAKRLSDERNLLQDSNFKDINRQPERGWGGSTGITIQGGDDVFKENYVTLSGTFDECYPTYLYQKIDESKLKAFTRYQLRGYIEDSQDLEIYLIRYNAKHETVNVPGTGSLWPLSAQSPIGKCGEPNRCAPHLEWNPDLDCSCRDGEKCAHHSHHFSLDIDVGCTDLNEDLGVWVIFKIKTQDGHARLGNLEFLEEKPLVGEALARVKRAEKKWRDKREKLEWETNIVYKEAKESVDALFVNSQYDQLQADTNIAMIHAADKRVHSIREAYLPELSVIPGVNAAIFEELEGRIFTAFSLYDARNVIKNGDFNNGLSCWNVKGHVDVEEQNNQRSVLVVPEWEAEVSQEVRVCPGRGYILRVTAYKEGYGEGCVTIHEIENNTDELKFSNCVEEEIYPNNTVTCNDYTVNQEEYGGAYTSRNRGYNEAPSVPVDYASVYEEKSYTDGRRENPCEFNRGYRDYTPLPVGYVTKELEYFPETDKVWIEIGETEGTFIVDSVELLLMEE

SEQ ID NO: 104 - protein, 1177 aa, Bacillus thuringiensis kenyae
MDNNPNINECIPYNCLSNPEVEVLGGERIETGYTPIDISLSLTQFLLSEFVPGAGFVLGLVDIIWGIFGPSQWDAFLVQIEQLINQRIEEFARNQAISRLEGLSNLYQIYAESFREWEADPTNPALREEMRIQFNDMNSALTTAIPLLAVQNYQVPLLSVYVQAANLHLSVLRDVSVFGQRWGFDAATINSRYNDLTRLIGNYTDHAVRWYNTGLERVWGPDSRDWVRYNQFRRELTLTVLDIVALFPNYDSRRYPIRTVSQLTREIYTNPVLENFDGSFRGSAQGIERSIRSPHLMDILNSITIYTDAHRGYYYWSGHQIMASPVGFSGPEFTFPLYGTMGNAAPQQRIVAQLGQGVYRTLSSTFYRRPFNIGINNQQLSVLDGTEFAYGTSSNLPSAVYRKSGTVDSLDEIPPQNNNVPPRQGFSHRLSHVSMFRSGSSSSVSIIRAPMFSWIHRSAEFNNIIASDSITQIPAVKGNFLFNGSVISGPGFTGGDLVRLNSSGNNIQNRGYIEVPIHFPSTSTRYRVRVRYASVTPIHLNVNWGNSSIFSNTVPATATSLDNLQSSDFGYFESANAFTSSLGNIVGVRNFSGTAGVIIDRFEFIPVTATLEAEYNLERAQKAVNALFTSTNQLGLKTNVTDYHIDQVSNLVTCLSDEFCLDEKRELSEKVKHAKRLSDERNLLQDSNFKDINRQPERGWGGSTGITIQGGDDVFKENYVTLSGTFDECYPTYLYQKIDESKLKAFTRYQLRGYIEDSQDLEIYLIRYNAKHETVNVPGTGSLWPLSAQSPIGKCGEPNRFAPHLEWNPDLDCSCRDGEKCAHHSHHFSLDIDVGCTDLNEDLGVWVIFKIKTQDGHARLGNLEFLEEKPLVGEALARVKRAEKKWRDKREKLEWETNIVYKEAKESVDALFVNSQYDQLQADTNIAMIHAADKRVHSIREAYLPELSVIPGVNAAIFEELEGRIFTAFSLYDARNVIKNGDFNNGLSCWNVKGHVDVEEQNNQRSVLVVPEWEAEVSQEVRVCPGRGYILRVTAYKEGYGEGCVTIHEIENNTDELKFSNCVEEEIYPNNTVTCNDYTVNQEEYGGAYTSRNRGYNEAPSVPADYASVYEEKSYTDGRRENPCEFNRGYRDYTPLPVGYVTKELEYFPETDKVWIEIGETEGTFIVDSVELLLMEE

SEQ ID NO: 105 - protein, 1177 aa, Bacillus thuringiensis
MDNNPNTNECIPYNCLSNPEVEVLGGERIETGYTPIDISLSLTQFLLSEFVPGAGFVLGLVDIIWGIFGPSQWDAFLVQIEQLINQRIEEFARNQAISRLEGLSNLYQIYAESFREWEADPTNPALREEMRIQFNDMNSALTTAIPLLAVQNYQVPLLSVYVQAANLHLSVLRDVSVFGQRWGFDAATINSRYNDLTRLIGNYTDYAVRWYNTGLERVWGPDSRDWVRYNQFRRELTLTVLDIVALFPNYDSRRYPIRTVSQLTREIYTNPVLENFDGSFRGSAQGIERSIRSPHLMDILNSITIYTDAHRGYYYWSGHQIMASPVGFSGPEFTFPLYGTMGNAAPQQRIVAQLGQGVYRTLSSTFYRRPFNIGINNQQLSVLDGTEFAYGTSSNLPSAVYRKSGTVDSLDEIPPQNNNVPPRQGFSHRLSHVSMFRSGSSSSVSIIRAPMFSWIHRSAEFNNIIASDSITQIPAVKGNFLFNGSVISGPGFTGGDLVRLNSSGNNIQNRGYIEVPIHFPSTSTRYRVRVRYASVTPIHLNVNWGNSSIFSNTVPATATSLDNLQSSDFGYFESANAFTSSLGNIVGVRNFSGTAGVIIDRFEFIPVTATLEAEYNLERAQKAVNALFTSTNQLGLKTNVTDYHIDQVSNLVTYLSDEFCLDEKRELSEKVKHAKRLSDERNLLQDSNFKDINRQPERGWGGSTGITIQGGDDVFKENYVTLSGTFDECYPTYLYQKIDESKLKAFTRYQLRGYIEDSQDLEIYLIRYNAKHETVNVPGTGSLWPLSAQSPIGKCGEPNRCAPHLEWNPDLDCSCRDGEKCAHHSHHFSLDIDVGCTDLNEDLGVWVIFKIKTQDGHARLGNLEFLEEKPLVGEALARVKRAEKKWRDKREKLEWETNIVYKEAKESVDALFVNSQYDQLQADTNIAMIHAADKRVHSIREAYLPELSVIPGVNAAIFEELEGRIFTAFSLYDARNVIKNGDFNNGLSCWNVKGHVDVEEQNNQRSVLVVPEWEAEVSQEVRVCPGRGYILRVTAYKEGYGEGCVTIHEIENNTDELKFSNCVEEEIYPNNTVTCNDYTVNQEEYGGAYTSRNRGYNEAPSVPADYASVYEEKSYTDGRRENPCEFNRGYRDYTPLPVGYVTKELEYFPETDKVWIEIGETEGTFIVDSVELLLMEE

SEQ ID NO: 106 - protein, 1164 aa, Bacillus thuringiensis INTA Mol-12
NECIPYNCLSNPEVEVLGGERIETGYTPIDISLSLTQFLLSEFVPGAGFVLGLVDIIWGIFGPSQWDAFLVQIEQLINQRIEEFARNQAISRLEGLSNLYQIYAESFREWEADPTNPALREEMRIQFNDMNSALTTAIPLLAVQNYQVPLLSVYVQAANLHLSVLRDVSVFGQRWGFDAATINSRYNDLTRLIGNYTDYAVRWYNTGLERVWGPDSRDWVRYNQFRRELTLTVLDIVALFPNYDSRRYPIRTVSQLTREIYTNPVLENFDGSFRGSAQGIERSIRSPHLMDILNSITIYTDAHRGYYYWSGHQIMASPVGFSGPEFTFPLYGTMGNAAPQQRIVAQLGQGVYRTLSSTFYRRPFNIGINNQQLSVLDGTEFAYGTSSNLPSAVYRKSGTVDSLDEIPPQNNNVPPRQGFSHRLSHVSMFRSGSSSSVSIIRAPMFSWIHRSAEFNNIIASDSITQIPAVKGNFLFNGSVISGPGFTGGDLVRLNSSGNNIQNRGYIEVPIHFPSTSTRYRVRVRYASVTPIHLNVNWGNSSIFSNTVPATATSLDNLQSSDFGYFESANAFTSSLGNIVGVRNFSGTAGVIIDRFEFIPVTATLEAEYNLERAQKAVNALFTSTNQLGLKTNVTDYHIDQVSNLVTYLSDEFCLDEKRELSEKVKHAKRLSDERNLLQDSNFKDINRQPERGWGGSTGITIQGGDDVFKENYVTLSGTFDECYPTYLYQKIDESKLKAFTRYQLRGYIEDSQDLEIYLIRYNAKHETVNVPGTGSLWPLSAQSPIGKCGEPNRCAPHLEWNPDLDCSCRDGEKCAHHSHHFSLDIDVGCTDLNEDLGVWVIFKIKTQDGHARLGNLEFLEEKPLVGEALARVKRAEKKWRDKREKLEWETNIVYKEAKESVDALFVNSQYDQLQADTNIAMIHAADKRVHSIREAYLPELSVIPGVNAAIFEELEGRIFTAFSLYDARNVIKNGDFNNGLSCWNVKGHVDVEEQNNQRSVLVVPEWEAEVSQEVRVCPGRGYILRVTAYKEGYGEGCVTIHEIENNTDELKFSNCVEEEIYPNNTVTCNDYTVNQEEYGGAYTSRNRGYNEAPSVPADYASVYEEKSYTDGRRENPCEFNRGYRDYTPLPVGYVTKELEYFPETDKVWIEIGETEGTFIVDSVE

SEQ ID NO: 107 - protein, 1178 aa, Bacillus thuringiensis W015-1
MDNNPNINECIPYNCLSNPEVEVLGGERIETGYTPIDISLSLTQFLLSEFVPGAGFVLGLVDIIWGIFGPSQWDAFLVQIEQLINQRIEEFARNQAISRLEGLSNLYQIYAESFREWEADPTNPALREEMRIQFNDMNSALTTAIPLFAVQNYQVPLLSVYVQAANLHLSVLRDVSVFGQRWGFDAATINSRYNDLTRLIGNYTDYAVRWYNTGLERVWGPDSRDWVRYNQFTRELTLTVLDIVALFPNYDSRRYPIRTVSQLTREIYTNPVLENFDGSFRGSAQGIERSIRSPHLMDILNSITIYTDAHRGYYYWSGHQIMASPVGFSGPEFTFPLYGTMGNAAPQQRIVAQLGQGVYRTLSSTLYRRPFNIGINNQQLSVLDGTEFAYGTSSNLPSAVYRKSGTVDSLDEIPPQNNNVPPRQGFSHRLSHVSMFRSGFSNSSVSIMRAPMFSWIHRSAEFNNIIASDSITQIPAVKGNFLFNGSVISGPGFTGGDLVRLNSSGNNIQNRGYIEVPIHFPSTSTRYRVRVRYASVTPIHLNVNWGNSSIFSNTVPATATSLDNLQSSDFGYFESANAFTSSLGNIVGVRNFSGTAGVIIDRFEFIPVTATLEAEYNLERAQKAVNALFTSTNQLGLKTNVTDYHIDQVSNLVTYLSDEFCLDEKRELSEKVKHAKRLSDERNLLQDSNFKDINRQPERGWGGSTGITIQGGDDVFKENYVTLSGTFDECYPTYLYQKIDESKLKAFTRYQLRGYIEDSQDLEIYLIRYNAKHETVNVPGTGSLWPLSAQSPIGKCGEPNRCAPHLEWNPDLDCSCRDGEKCAHHSHHFSLDIDVGCTDLNEDLGVWVIFKIKTQDGHARLGNLEFLEEKPLVGEALARVKRAEKKWRDKREKLEWETNIVYKEAKESVDALFVNSQYDQLQADTNIAMIHAADKRVHSIREAYLPELSVIPGVNAAIFEELEGRIFTAFSLYDARNVIKNGDFNNGLSCWNVKGHVDVEEQNNQRSVLVVPEWEAEVSQEVRVCPGRGYILRVTAYKEGYGEGCVTIHEIENNTDELKFSNCVEEEIYPNNTVTCNDYTVNQEEYGGAYTSRNRGYNEAPSVPADYASVYEEKSYTDGRRENPCEFNRGYRDYTPLPVGYVTKELEYFPETDKVWIKIGETEGTFIVDSVELLLMEE

SEQ ID NO: 108 - protein, 960 aa, Bacillus thuringiensis serovar kurstaki
  misc_feature (560)..(560): Xaa can be any naturally occurring amino acid
MDNNPNTNECIPYNCLSNPEVEVLGGERIETGYTPIDISLSLTQFLLSEFVPGAGFVLGLVDIIWGIFGPSQWDDAFLVQIEQLINQRIEEFARNPAISRLEGGLSNLYQIYAESFREWEADPTNPALREEMRIQFNDMNSALTTAIPLLAVQNYQVPLLSVYVQAANLHYSVLRDVSVFGQRWGFDAAATINSRYNDLTSPIGNYTDYAVRWYNTGLERVWGPDSRDWVRYNQFRRELTLTVLDIVALLFPNYDSRRRRYPIRTVSQLTREIYTNPVLENFDGSSFRGSAQGIERSSIRSPHLMDILNSITIYTDAHRGYYYCSGHQIMASPVGFSGPEFTFPLYGTMGNAAPQQRMVAQLGQGVYRTLSSSTYYRRPFNIGINNQQLSVLDGTEFAYGTSSNLPSAVYRKSGTVDSLDEIPPQNNNVPPRQGFSHRLSHVSMFRSGFSNSSVSIISAPMFSWIHRSAEFNNTIASDSITQIPAAVKGNFLFNGSVISGPGFTGGDLVRLNSSGNNIQNRGYIEVPIHFPSTSTRYRVRVRYASVTPIHLNVNWGNSSXSIFSNTVPATATSLDNLQSSDFGYFESANAFTSSLGNIVGVRNFSGTAGVIIDRFEFIPVTATLEAEYNLERAQKAVNALFTSTNQLGLKTNVTDYHIDQVSNLVTYLSDEFCLDEKRELSEKVKHAKRLSDERNLLQDSNFKDINRQPERGWGGSTGITIIQGGDDVFKENYVTLSGTFDECYPTYLYQKIDESKLKAFTRYQLRGYIEDSQDLEIYLIRYNAKHETVNRYGTGSLWPLSAQSPIGKCGEPNRCAPHLEWNPDLDCSCRDGEKCAHHSHHFSLDIDVGCTDLNEDLGVWVIFKIKTQDGHARLGNLEFLEEKPLVGEALARVKRAEKKWRDKREKLEWETNIVYKEAKESVDALFVNSQYDQLQADTNIAMIHAAADDNRVHSIREAYL

SEQ ID NO: 109 - protein, 1177 aa, Bacillus thuringiensis 146-158-01
MDNNPNINECNPYNCLSNPEVEVLGGERIETGYTPIDISLSLTQFLLSEFVPGAGFVLGLVDIIWGIFGPSQWDAFLVQIEQLINQRIEEFARNQAISRLEGLSNLYQIYAESFREWEADPTNPALREEMRIQFNDMNSALTTAIPLLAVQNYQVPLLSVYVQAANLHLSVLRDVSVFGQRWGFDAATINSRYNDLTRLIGNYTDYAVRWYNTGLERVWGPDSRDWVRYNQFRRELTLTVLDIVALFSNYDSRRYPIRTVSQLTREIYTNPVLENFDGSFRGSAQGIERSIRSPHLMDILNSITIYTDAHRGYYYWSGHQIMASPVGFSGPEFTFPLYGTMGNAAPQQRIVAQLGQGVYRTLSSTFYRRPFNIGINNQQLSVLDGTEFAYGTSSNLPSAVYRKSGTVDSLDEIPPQNNNVPPRQGFSHRLSHVSMFRSGSSSSVSIIRAPMFSWIHRSAEFNNIIASDSITQIPAVKGNFLFNGSVISGPGFTGGDLVRLNSSGNNFQNRGYIEVPIHFPSTSTRYRVRVRYASVTPIHLNVNWGNSSIFSNTVPATATSLDNLQSSDFGYFESANAFTSSLGNIVGVRNFSGTAGVIIDRFEFIPVTATLEAEYNLERAQKAVNALFTSTNQLGLKTNVTDYHIDQVSNLVTYLSDEFCLDEKRELSEKVKHAKRLSDERNLLQDSNFKDINRQPERGWGGSTGITIQGGDDVFKENYVTLSGTFDECYPTYLYQKIDESKLKAFTRYQLRGYIEDSQDLEIYLIRYNAKHETVNVPGTGSLWPLSAQSPIGKCGEPNRCAPHLEWNPDLDCSCRDGEKCAHHSHHFSLDIDVGCTDLNEDLGVWVIFKIKTQDGHARLGNLEFLEEKPLVGEALARVKRAEKKWRDKREKLEWETNIVYKEAKESVDALFVNSQYDQLQADTNIAMIHAADKRVHSIREAYLPELSVIPGVNAAIFEELEGRIFTAFSLYDARNVIKNGDFNNGLSCWNVKGHVDVEEQNNQRSVLVVPEWEAEVSQEVRVCPGRGYILRVTAYKEGYGEGCVTIHEIENNTDELKFSNCVEEEIYPNNTVTCNDYTVNQEEYGGAYTSRNRGYNEAPSVPADYASVYEEKSYTDGRRENPCEFNRGYRDYTPLPVGYVTKELEYFPETDKVWIEIGETEGTFIVDSVELLLMEE

SEQ ID NO: 110 - protein, 1177 aa, Bacillus thuringiensis Tm37-6
MDNNPNINECIPYNCLSNPEVEVLGGERIETGYTPIDISLSLTQFLLSEFVPGAGFVLGLVDIIWGIFGPSQWDAFLVQIEQLINQRIEEFARNQAISRLEGLSNLYQIYAESFREWEADPTNPALREEMRIQFNDMNSALTTAIPLLAVQNYQVPLLSVYVQAANLHLSVLRDVSVFGQRWGFDAATINSRYNDLTRLIGNYTDYAVRWYNTGLERVWGPDSRDWVRYSQFRRELTLTVLDIVALFPNYDSRRYPIRTVSQLTREIYTNPVLENFDGSFRGSAQGIERSIRSPHLMDILNSITIYTDAHRGYYYWSGHQIMASPVGFSGPEFTFPLYGTMGNAAPQQRIVAQLGQGVYRTLSSTFYRRPFNIGINNQQLSVLDGTEFAYGTSSNLPSAVYRKSGTVDSLDEIPPQNNNVPPRQGFSHRLSHVSMFRSGSSSSVSIIRAPTFSWIHRSAEFNNIIASDSITQIPAVKGNFLFNGSVISGPGFTGGDLVRLNSSGNNIQNRGYIEVPIHFPSTSTRYRVRVRYASVTPIHLNVNWGNSSIFSNTVPATATSLDNLQSSDFGYFESANAFTSSLGNIVGVRNFSGTAGVIIDRFEFIPVTATLEAEYNLERAQKAVNALFTSTNQLGLKTNVTDYHIDQVSNLVTYLSDEFCLDEKRELSEKVKHAKRLSDERNLLQDSNFKDINRQPERGWGGSTGITIQGGDDVFKENYVTLSGTFDECYPTYLHQKIDESKLKAFTRHQLRGYIEDSQDLEIYLIRYNAKHETVNVPGTGSLWPLSAQSPIGKCGEPNRCAPHLEWNPDLDCSCRDGEKCAHHSHHFSLDIDVGCTDLNEDLGVWVIFKIKTQDGHARLGNLEFLEEKPLVGEALARVKRAEKKWRDKREKLEWETNIVYKEAKESVDALFVNSQYDQLQADTNIAMIHAADKRVHSIREAYLPELSVIPGVNAAIFEELEGRIFTAFSLYDARNVIKNGDFNNGLSCWNVKGHVDVEEQNNQRSVLVVPEWEAEVSQEVRVCPGRGYILRVTAYKEGYGEGCVTIHEIENNTDELKFSNCVEEEIYPNNTVTCNDYTVNQEEYGGAYTSRNRGYNEAPSVPADYASVYEEKSYTDGRRENPCEFNRGYRDYTPLPVGYVTKELEYFPETDKVWIEIGETEGTFIVDSVELLLMEE

SEQ ID NO: 111 - protein, 1177 aa, Bacillus thuringiensis Tm41-4
MDNNPNINECIPYNCLSNPEVEVLGGERIETGYTPIDISLSLTQFLLSEFVPGAGFVLGLVDIIWGIFGPSQWDAFLVQIEQLINQRIEEFARNQAISRLEGLSNLYQIYAESFREWEADPTNPALREEMRIQFNDMNSALTTAIPLLAVQNYQVPLLSVYVQAANLHLSVLRDVSVFGQRWGFDAATINSRYNDLTRLIGNYTDYAVRWYNTGLERVWGPDSRDWVRYNQFRRELTLTVLDIVALFPNYDSRRYPIRTVSQLTREIYTNPVLENFDGSFRGSAQGIERSIRSPHLMDILNSITIYTDAHRGYYYWSGHQIMASPVGFSGPEFTFPLYGTMGNAAPQQRIVAQLGQGVYRTLSSTFYRRPFNIGINNQQLSVLDGTEFAYGTSSNLPSAVYRKSGTVDSLDEIPPQNNNVPPRQGFSHRLSHVSMFRSGSSSSVSIIRAPMFSWIHRSAEFNNIIASDSITQIPAVKGNFLFNGSVISGPGFTGGDLVRLNSSGNNIQNRGYIEVPIHFPSTSTRYRVRVRYASVTPIHLNVNWGNSSIFSNTVPATATSLDNLQSSDFGYFESANAFTSSLGNIVGVRNFSGTAGVIIDRFEFIPVTATLEAEYNLERAQKAVNALFTSTNQLGLKTNVTDYHIDQVSNLVTYLSDEFCLDEKRELSEKVKHAKRLSDERNLLQDSNFKDINRQPERGWGGSTGITIQGGDDVFKENYVTLSGTFDECYPTYLYQKIDESKLKAFTRYQLRGYIEDSQDLEIYLIRYNAKHETVNVPGTGSLWPLSAQSPIGKCGEPNRCAPHLEWNPDLDCSCRDGEKCAHHSHHFSLDIDVGCTDLNEDLGVWVIFKIKTQDGHARLGNLEFLEEKPLVGEALARVKRAEKKWRDKREKLEWETNIVYKEAKESVDALFVNSQYDQLQADTNIAMIHAADKRVHSIREAYLPELSVIPGVNAAIFEELEGRIFTAFSLYDARNVIKNGDFNNGLSCWNVKGHVDVEEQNNQRSVLVVPEWEAEVSQEVRVCPGRGYILRVTAYKEGYGEGCVTIHEIENNTDELKFSNCVEEEIYPNNTVTCNDYTVNQEEYGGAYTSRNRGYNEAPSVPADYASVYEEKSYTDGRRENPCEFNRGYRDYTPLPVGYVTKELEYFPETDKVWIEIGETEGTFIVDSYSVPLGGG

SEQ ID NO: 112 - protein, 1177 aa, Bacillus thuringiensis Tm44-1B
MDNNPNINECIPYNCLSNPEVEVLGGERIETGYTPIDISLSLTQFLLSEFVPGAGFVLGLVDIIWGIFGPSQWDAFLVQIEQLINQRIEEFARNQAISRLEGLSNLYQIYAESFREWEADPTNPALREEMRIQFNDMNSALTTAIPLLAVQNYQVPLLSVYVQAANLHLSVLRDVSVFGQRWGFDAATINSRYNDLTRLIGNYTDYAVRWYNTGLERVWGPDSRDWVRYNQFRRELTLTVLDIVALFPNYDSRRYPIRTVSQLTREIYTNPVLENFDGSFRGSAQGIERSIRSPHLMDILNSITIYTDAHRGYYYWSGHQIMASPVGFSGPEFTFPLYGTMGNAASQQRIVAQLGQGVYRTLSSTFYRRPFNIGINNQQLSVLDGTEFAYGTSSNLPSAVYRKSGTVDSLDEIPPQNNNVPPRQGFSHRLSHVSMFRSGSSSSVSIIRAPMFSWIHRSAEFNNIIASDSITQIPAVKGNFLFNGSVISGPGFTGGDLVRLNSSGNNIQNRGYIEVPIHFPSTSTRYRVRVRYASVTPIHLNVNWGNSSIFSNTVPATATSLDNLQSSDFGYFESANAFTSSLGNIVGVRNFSGTAGVIIDRFEFIPVTATLEAEYNLERAQKAVNALFTSTNQLGLKTNVTDYHIDQVSNLVTYLSDEFCLDEKRELSEKVKHAKRLSDERNLLQDSNFKDINRQPERGWGGSTGITIQGGDDVFKENYVTLSGTFDECYPTYLYQKIDESKLKAFTRYQLRGYIEDSQDLEIYLIRYNAKHETVNVPGTGSLWPLSAQSPIGKCGEPNRCAPHLEWNPDLDCSCRDGEKCAHHSHHFSLDIDVGCTDLNEDLGVWVIFKIKTQDGHARLGNLEFLEEKPLVGEALARVKRAEKKWRDKREKLEWETNIVYKEAKESVDALFVNSQYDQLQADTNIAMIHAADKRVHSIREAYLPELSVIPGVNAAIFEELEGRIFTAFSLYDARNVIKNGDFNNGLSCWNVKGHVDVEEQNNQRSVLVVPEWEAEVSQEVRVCPGRGYILRVTAYKEGYGEGCVTIHEIENNTDELKFSNCVEEEIYPNNTVTCNDYTVNQEEYGGAYTSRNRGYNEAPSVPADYASVYEEKSYTDGRRENPCEFNRGYRDYTPLPVGYVTKELEYFPETDKVWIEIGETEGTFIVDSVQYPVTEE

SEQ ID NO: 113 - protein, 1178 aa, Bacillus thuringiensis Q-12
MDNNPNINECIPYNCLSNPEVEVLGGERIETGYTPIDISLSLTQFLLSEFVPGAGFVLGLVDIIWGIFGPSQWDAFLVQIEQLINQRIEEFARNQAISRLEGLSNLYQIYAESFREWEADPTNPALREEMRIQFNDMNSALTTAIPLFAVQNYQVPLLSVYVQAANLHLSVLRDVSVFGQRWGFDAATINSRYNDLTRLIGNYTDYAVRWYNTGLERVWGPDSRDWVRYNQFRRELTLTVLDIVALFPNYDSRRYPIRTVSQLTREIYTNPVLENFDGSFRGSAQGIERSIRSPHLMDILNSITIYTDAHRGYYYWSGHQVMASPVGFSGPEFTFPLYGTMGNAAPQQRIVAQLGQGVYRTLSSTLYRRPFNIGINNQQLSVLDGTEFAYGTSSNLPSAVYRKSGTVDSLDEIPPQNNNVPPRQGFSHRLSHVSMFRSGFSNSSVSIIRAPMLSWIHRSAEFNNIIASDSITQIPAVKGNFLFNGSVISGPGFTGGDLVRLNSSGNNIQNRGYIEVPIHFPSTSTRYRVRVRYASVTPIHLNVNWGNSSIFSNTVPATATSLDNLQSSDFGYFESANAFTSSLGNIVGVRNFSGTAGVIIDRFEFIPVTATLEAEYNLERAQKAVNALFTSTNQLGLKTNVTDYHIDQVSNLVTYLSDEFCLDEKRELSEKVKHAKRLSDERNLLQDSNFKDINRQPERGWGGSTGITIQGGDDVFKENYVTLSSTFDECYPTYLYQKIDESKLKAFTRYRLRGYIEDSQDLEIYLIRYNAKHETVNVPGTGSLWPLSAQSPIGKCGEPNRCAPHLEWNPDLDCSCRDGEKCAHHSHHFSLDIDVGCTDLNEDLGVWVIFKIKTQDGHARLGNLEFLEEKPLVGEALARVKRAEKKWRDKREKLEWETNIVYKEAKESVDALFVNSQYDQLQADTNIAMIHAADKRVHSIREAYLPELSVIPGVNAAIFEELEGRIFTAFSLYDARNVIKNGDFNNGLSCWNVKGHVDVEEQNNQRSVLVVPEWEAEVSQEVRVCPGRGYILRVTAYKEGYGEGCVTIHEIENNTDELKFSNCVEEEIYPNNTVTCNDYTVNQEEYGGAYTSRNRGYNEAPSVPADYASVYEEKSYTDGRRENPCEFNRGYRDYTPLPVGYVTKELEYFPETDKVWIEIGETEGTFIVDSVELLLMEE

SEQ ID NO: 114 - protein, 1164 aa, Bacillus thuringiensis INTA TA24-6; identical to SEQ ID NO: 106

SEQ ID NO: 115 - protein, 618 aa, Bacillus thuringiensis BTS89A
MDNNPNINECIPYNCLSNPEVEVLGGERIETGYTPIDISLSLTQFLLSEFVPGAGFVLGLVDIIWGIFGPSQWDAFLVQIEQLINQRIEEFARNQAISRLEGLSNLYQIYAESFREWEADPTNPALREEMRIQFNDMNSALTTAIPLLAVQNYQVPLLSVYVQAANLHLSVLRDVSVFGQRWGFDAATINSRYNDLTRLIGNYTDYAVRWYNTGLERVWGPDSRDWVRYNQFRRELTLTVLDIVALFPNYDSRRYPIRTVSQLTREIYTNPVLENFDGSFRGSAQGIERSIRSPHLMDILNSITIYTDAHRGYYYWSGHQIMASPVGFSGPEFTFPLYGTMGNAAPQQRIVAQLGQGVYRTLSSTFYRRPFNIGINNQQLSVLDGTEFAYGTSSNLPSAVYRKSGTVDSLDEIPPQNNNVPPRQGFSHRLSHVSMFRSGSSSSVSIIRAPMFSWIHRSAEFNNIIASDSITQIPAVKGNFLFNGSVISGPGFTGGDLVRLNSSGNNIQNRGYIEVPIHFPSTSTRYRVRVRYASVTPIHLNVNWGNSSIFSNTVPATATSLDNLQSSDFGYFESANAFTSSLGNIVGVRNFSGTAGVIIDRFEFIPVTATLEAEYNLE

SEQ ID NO: 116 - protein, 1178 aa, Bacillus thuringiensis S1478-1
MDNNPNINECIPYNCLSNPEVEVLGGERIETGYTPIDISLSLTQFLLSEFVPGAGFVLGLVDIIWGIFGPSQWDAFLVQIEQLINQRIEEFARNQAISRLEGLSNLYQIYAESFREWEADPTNPALREEMRIQFNDMNSALTTAIPLFAVQNYQVPLLSVYVQAANLHLSVLRDVSVFGQRWGFDAATINSRYNDLTRLIGNYTDYAVRWYNTGLERVWGPDSRDWVRYNQFRRELTLTVLDIVALFPNYDSRRYPIRTVSQLTREIYTNPVLENFDGSFRGSAQGIERSIRSPHLMDILNSITIYTDAHRGYYYWSGHQIMASPVGFSGPEFTFPLYGTMGNAAPQQRIVAQLGQGVYRTLSSTLYRRPFNIGINNQQLSVLDGTEFAYGTSSNLPSAVYRKSGTVDSLDEIPPQNNNVPPRQGFSHRLSHVSMFRSGFSNSSVSIIRAPMFSWIHRSAEFNNIIASDSITQIPAVKGNFLFNGSVISGPGFTGGDLVRLNSSGNNIQNRGYIEVPIHFPSTSTRYRVRVRYASVTPIHLNVNWGNSSIFSNTVPATATSLDNLQSSDFGYFESANAFTSSLGNIVGVRNFSGTAGVIIDRFEFIRVTATLEAEYNLERAQKAVNALFTSTNQLGLKTNVTDYHIDQVSNLVTYLSDEFCLDEKRELSEKVKHAKRLSDERNLLQDSNFKDINRQPERGWGGSTGITIQGGDDVFKENYVTLSGTFDECYPTYLYQKIDESKLKAFTRYQLRGYIEDSQDLEIYLIRYNAKHETVNVPGTGSLWPLSAQSPIGKCGEPNRCAPHLEWNPDLDCSCRDGEKCAHHSHHFSLDIDVGCTDLNEDLGVWVIFKIKTQDGHARLGNLEFLEEKPLVGEALARVKRAEKKWRDKREKLEWETNIVYKEAKESVDALFVNSQYDQLQADTNIAMIHAADKRVHSIREAYLPELSVIPGVNAAIFEELEGRIFTAFSLYDARNVIKNGDFNNGLSCWNVKGHVDVEEQNNQRSVLVVPEWEAEVSQEVRVCPGRGYILRVTAYKEGYGEGCVTIHEIENNTDELKFSNCVEEEIYPNNTVTCNDYTVNQEEYGGAYTSRNRGYNEAPSVPADYASVYEEKSYTDGRRENPCEFNRGYRDYTPLPVGYVTKELEYFPETDKVWIEIGETEGTFIVDSVELLLMEE

SEQ ID NO: 117 - protein, 1178 aa, Bacillus thuringiensis S3299-1
MDNNPNINECIPYNCLSNPEVEVLGGERIETGYTPIDISLSLTQFLLSEFVPGAGFVLGLVDIIWGIFGPSQWDAFLVQIEQLINQRIEEFARNQAISRLEGLSNLYQIYAESFREWEADPTNPALREEMRIQFNDMNSALTTAIPLFAVQNYQVPLLSVYVQAANLHLSVLRDVSVFGQRWGFDAATINSRYNDLTRLIGNYTDYAVRWYNTGLERVWGPDSRDWVRYNQFRRELTLTVLDIVALFPNYDSRRYPIRTVSQLTREIYTNPVLENFDGSFRGSAQGIERSIRSPHLMDILNSITIYTDAHRGYYYWSGHQIMASPVGFSGPEFTFPLYGTMGNAAPQQRIVAQLGQGVYRTLSSTLYRRPFNIGINNQQLSVLDGTEFAYGTSSNLPSAVYRKSGTVDSLDEIPPQNNNVPPRQGFSHRLSHVSMFRSGFSNSSVSIIRAPMFSWIHRSAEFNNIIASDSITQIPAVKGNFLFNGSVISGPGFTGGDLVRLNSSGNNIQNRGYIEVPIHFPSTSTRYRVRVRYASVTPIHLNVNWGNSSIFSNTVPATATSLDNLQSSDFGYFESANAFTSSLGNIVGVRNFSGTAGVIIDRFEFIPVTATLEAEYNLERAQKAVNALFTSTNQLGLKTNVTDYHIDQVSNLVTYLSDEFCLDEKRELSEKVKHAKRLSDERNLLQDSNFKDINRQPERGWGGSTGITIQGGDDVFKENYVTLSGTFDECYPTYLYQKIDESKLKAFTRYQLRGYIEDSQDLEIYLIRYNAKHETVNVPGTGSLWPLSAQSPIGKCGEPNRCAPHLEWNPDLDCSCRDGEMCAHHSHHFSLDIDVGCTDLNEDLGVWVIFKIKTQDGHARLGNLEFLEEKPLVGEALARVKRAEKKWRDKRGKLEWETNIVYKEAKESVDALFVNSQYDQLQADTNIAMIHAADKRVHSIREAYLPELSVIPGVNAAIFEELEGRIFTAFSLYDARNVIKNGDFNNGLSCWNVKGHVDVEEQNNQRSVLVVPEWEAEVSQEVRVCPGRGYILRVTAYKEGYGEGCVTIHEIENNTDELKFSNCVEEEIYPNNTVTCNDYTVNQEEYGGAYTSRNRGYNEAPSVPADYASVYEEKSYTDGRRENPCEFNRGYRDYTPLPVGYVTKELEYFPETDKVWIEIGETGGTFIVDSVELLLMEE

SEQ ID NO: 118 - protein, 1177 aa, Bacillus thuringiensis ZQ-89
MDNNPNINECIPYNCLSNPEVEVLGGERIETGYTPIDISLSLTQFLLSEFVPGAGFVLGLVDIIWGIFGPSQWDAFLVQIEQLINQRIEEFARNQAISRLEGLSNLYQIYAESFREWEADPTNPALREEMRIQFNDMNSALTTAIPLLAVQNYQVPLLSVYVQAANLHLSVLRDVSVFGQRWGFDAATINSRYNDLTRLIGNYTDYAVRWYNTGLERVWGPDSRDWVRYNQFRRELTLTVLDIVALFPNYDSRRYPIRTVSQLTREIYTNPVLENFDGSFRGSAQGIERSIRSPHLMDILNSITIYTDAHRGYYYWSGHQIMASPVGFSGPEFTFPLYGTMGNAAPQQRIVAQLGQGVYRTLSSTFYRRPFNIGINNQQLSVLDGTEFAYGTSSNLPSAVYRKSGTVDSLDEIPPQNNNVPPRQGFSHRLSHVSMFRSGSSSSVSIIRAPMFSWIHRSAEFNNIIASDSITQIPAVKGNFLFNGSVISGPGFTGGDLVRLNSSGNNIQNRGYIEVPIHFPSTSTRYRVRVRYASVTPIHLNVNWGNSSIFSNTVPATATSLDNLQSSDFGYFESANAFTSSLGNIVGVRNFSGTAGVIIDRFEFIPVTATLEAEYNLERAQKAVNALFTSTNQLGLKTNVTDYHIDQVSNLVTYLSDEFCLDEKRELSEKVKHAKRLSDERNLLQDSNFKDINRQPERGWGGSTGITIQGGDDVFKENYVTLSGTFDECYPTYLYQKIDESKLKAFTRYQLRGYIEDSQDLEIYLIRYNAKHETVNVPGTGSLWPLSAQSPIGKCGEPNRCAPHLEWNPDLDCSCRDGEKCAHHSHHFSLDIDVGCTDLNEDLGVWVIFKIKTQDGHARLGNLEFLEEKPLVGEALARVKRAEKKWRDKREKLEWETNIVYKEAKESVDALFVNSQYDQLQADTNIAKIHAADKRVHSIREAYLPELSVIPGVNAAIFEELEGRIFTAFSLYDARNVIKNGDFNNGLSCWNVKGHVDVEEQNNQRSVLVVPEWEAEVSQEVRVCPGRGYILRVTAYKEGYGEGCVTIHEIENNTDELKFSNCVEEEIYPNNTVTCNDYTVNQEEYGGAYTSRNRGYNEAPSVPADYASVYEEKSYTDGRRENPCEFNRGYRDYTPLPVGYVTKELEYFPETDKVWIEIGETEGTFIVDSVELLLMEE

SEQ ID NO: 119 - protein, 1172 aa, Bacillus thuringiensis SK-711
MDNNPNINECIPYNCLSNPEVEVLGGERIETGYTPIDISLSLTQFLLSEFVPGAGFVLGLVDIIWGIFGPSQWDAFLVQIEQLINQRIEEFARNQAISRLEGLSNLYQIYAESFREWEADPTNPALREEMRIQFNDMNSALTTAIPLLAVQNYQVPLLSVYVQAANLHLSVLRDVSVFGQRWGFDAATINSRYNDLTRLIGNYTDHAVRWYNTGLERVWGPDSRDWVRYNQFRRELTLTVLDIVALFPNYDSRRYPIRTVSQLTREIYTNPVLENFDGSFRGSAQGIERSIRSPHLMDILNSITIYTDAHRGYYYWSGHQIMASPVGFSGPEFTFPLYGTMGNAAPQQRIVAQLGQGVYRTLSSTFYRRPFNIGINNQQLSVLDGTEFAYGTSSNLPSAVYRKSGTVDSLDEIPPQNNNVPPRQGFSHRLSHVSMFRSGSSSSVSIIRAPMFSWIHRSAEFNNIIAPDSITQIPAVKGNFLFNGSVISGPGFTGGDLVRLNSSGNNIQNRGYIEVPIHFPSTSTRYRVRVRYASVTPIHLYVNWGNSSIFSNTVPATATSLDNLQSSDFGYFESANAFTSSLGNIVGVRNFSGTAGVIIDRFEFIPVTATLEAEYNLERAQKAVNALFTSTNQLGLKTNVTDYHIDQVSNLVTCLSDEFCLDEKRELSEKVKHAKRLSDERNLLQDSNFKDINRQPERGWGGSTGITIQGGDDVFKENYVTLSGTFDECYPTYLYQKIDESKLKAFTRYQLRGYIEDSQDLEIYLIRYNAKHETVNVPGTGSLWPLSAQSPIGKCGEPNRFAPHLEWNPDLDCSCRDGEKCAHHSHHFSLDIDVGCTDLNEDLGVWVIFKIKTQDGHARLGNLEFLEEKPLVGEALARVKRAEKKWRDKREKLEWETNIVYKEAKESVDALFVNSQYDQLQADTNIAMIHAADKRVHSIREAYLPELSVIPGVNAAIFEELEGRIFTAFSLYDARNVIKNGDFNNGLSCWNVKGHVDVEEQNNQRSVLVVPEWEAEVSQEVRVCPGRGYILRVTAYKEGYGEGCVTIHEIENNTDELKFSNCVEEEIYPNNTVTCNDYTVNQEEYGGAYTSRNRGYNEAPSVPADYASVYEEKSYTDGRRENPCEFNRGYRDYTPLPVGYVTKELEYFPETDKVWIEIGETEGTFIVDSVEL

SEQ ID NO: 120 - protein, 608 aa, Bacillus thuringiensis SK-783
MDNNPNINECIPYNCLSNPEVEVLGGERIETGYTPIDISLSLTQFLLSEFVPGAGFVLGLVDIIWGIFGPSQWDAFLVQIEQLINQRIEEFARNQAISRLEGLSNLYQIYAESFREWEADPTNPALREEMRIQFNDMNSALTTAIPLLAVQNYQVPLLSVYVQAANLHLSVLRDVSVFGQRWGFDAATINSRYNDLTRLIGNYTDHAVRWYNTGLERVWGPDSRDWVRYNQFRRELTLTVLDIVALFPNYDSRRYPIRTVSQLTREIYTNPVLENFDGSFRGSAQGIERSIRSPHLMDILNSITIYTDAHRGYYYWSGHQIMASPVGFSGPEFTFPLYGTMGNAAPQQRIVAQLGQGVYRTLSSTFYRRPFNIGINNQQLSVLDGTEFAYGTSSNLPSAVYRKSGTVDSLDEIPPQNNNVPPRQGFSHRLSHVSMFRSGSSSSVSIIRAPMFSWIHRSAEFNNIIASDSITQIPAVKGNFLFNGSVISGPGFTGGDLVRLNSSGNNIQNRGYIEVPIHFPSTSTRYRVRVRYASVTPIHLYVNWGNSSIFSNTVPATATSLDNLQSSDFGYFESANAFTSSLGNIVGVRNFSGTAGVIIDRFEFIPVT

SEQ ID NO: 121 - protein, 1178 aa, Bacillus thuringiensis kurstaki PS85A1
MDNNPNINECIPYNCLSNPEVEVLGGERIETGYTPIDISLSLTQFLLSEFVPGAGFVLGLVDIIWGIFGPSQWDAFLVQIEQLINQRIEEFARNQAISRLEGLSNLYQIYAESFREWEADPTNPALREEMRIQFNDMNSALTTAIPLLAVQNYQVPLLSVYVQAANLHLSVLRDVSVFGQRWGFDAATINSRYNDLTRLIGNYTDYAVRWYNTGLERVWGPDSRDWVRYNQFRRELTLTVLDIVALFPNYDSRRYPIRTVSQLTREIYTNPVLENFDGSFRGSAQGIERSIRSPHLMDILNSITIYTDAHRGYYYWSGHQIMASPVGFSGPEFTFPLYGTMGNAAPQQRIVAQLGQGVYRTLSSTLYRRPFNIGINNQQLSVLDGTEFAYGTSSNLPSAVYRKSGTVDSLDEIPPQNNNVPPRQGFSHRLSHVSMFRSGFSNSSVSIIRAPMFSWIHRSAEFNNIIASDSITQIPAVKGNFLFNGSVISGPGFTGGDLVRLNSSGNNIQNRGYIEVPIHFPSTSTRYRVRVRYASVTPIHLNVNWGNSSIFSNTVPATATSLDNLQSSDFGYFESANAFTSSLGNIVGVRNFSGTAGVIIDRFEFIPVTATLEAEYNLERAQKAVNALFTSTNQLGLKTNVTDYHIDQVSNLVTYLSDEFCLDEKRELSEKVKHAKRLSDERNLLQDSNFKDINRQPERGWGGSTGITIQGGDDVFKENYVTLSGTFDECYPTYLYQKIDESKLKAFTRYQLRGYIEDSQDLEIYLIRYNAKHETVNVPGTGSLWPLSAQSPIGKCGEPNRCAPHLEWNPDLDCSCRDGEKCAHHSHHFSLDIDVGCTDLNEDLGVWVIFKIKTQDGHARLGNLEFLEEKPLVGEALARVKRAEKKWRDKREKLEWETNIVYKEAKESVDALFVNSQYDQLQADTNIAMIHAADKRVHSIREAYLPELSVIPGVNAAIFEELEGRIFTAFSLYDARNVIKNGDFNNGLSCWNVKGHVDVEEQNNQRSVLVVPEWEAEVSQEVRVCPGRGYILRVTAYKEGYGEGCVTIHEIENNTDELKFSNCVEEEIYPNNTVTCNDYTVNQEEYGGAYTSRNRGYNEAPSVPADYASVYEEKSYTDGRRENPCEFNRGYRDYTPLPVGYVTKELEYFPETDKVWIEIGETEGTFIVDSVELLLMEE

SEQ ID NO: 122 - protein, 1177 aa, Bacillus thuringiensis kurstaki PS81GG; identical to SEQ ID NO: 101

SEQ ID NO: 123 - protein, 607 aa, Bacillus thuringiensis kurstaki NRD-12
MDNNPNINECIPYNCLSNPEVEVLGGERIETGYTPIDISLSLTQFLLSEFVPGAGFVLGLVDIIWGIFGPSQWDAFLVQIEQLINQRIEEFARNQAISRLEGLSNLYQIYAESFREWEADPTNPALREEMRIQFNDMNSALTTAIPLLAVQNYQVPLLSVYVQAANLHLSVLRDVSVFGQRWGFDAATINSRYNDLTRLIGNYTDYAVRWYNTGLERVWGPDSRDWVRYNQFRRELTLTVLDIVALFPNYDSRRYPIRTVSQLTREIYTNPVLENFDGSFRGSAQGIERSIRSPHLMDILNSITIYTDAHRGYYYWSGHQIMASPVGFSGPEFTFPLYGTMGNAAPQQRIVAQLGQGVYRTLSSTFYRRPFNIGINNQQLSVLDGTEFAYGTSSNLPSAVYRKSGTVDSLDEIPPQNNNVPPRQGFSHRLSHVSMFRSGSSSSVSIIRAPMFSWIHRSAEFNNIIASDSITQIPAVKGNFLFNGSVISGPGFTGGDLVRLNSSGNNIQNRGYIEVPIHFPSTSTRYRVRVRYASVTPIHLNVNWGNSSIFSNTVPATATSLDNLQSSDFGYFESANAFTSSLGNIVGVRNFSGTAGVIIDRFEFIPV

SEQ ID NO: 124 - protein, 1178 aa, Bacillus thuringiensis kurstaki HD73; identical to SEQ ID NO: 94

SEQ ID NO: 125 - protein, 1178 aa, Bacillus thuringiensis kurstaki HD73; identical to SEQ ID NO: 94

SEQ ID NO: 126 - protein, 1178 aa, Bacillus thuringiensis DSIR732; identical to SEQ ID NO: 94

SEQ ID NO: 127 - protein, 1179 aa, Bacillus thuringiensis aizawai PS81I
MEIMNNQNQCVPYNCLNDPTIEILEGERIETGYTPIDISLSLTQFLLSEFVPGAGFVLGLIDLIWGFVGPSQWDAFLVQIEQLINQRIEEFARNQAISRLEGLSNLYQIYAEAFREWEADPTNPALTEEMRIQFNDMNSALTTAIPLFTVQNYQVPLLSVYVQAANLHLSVLRDVSVFGQRWGFDVATINSRYNDLTRLIGTYTDYAVRWYNTGLERVWGPDSRDWVRYNQFRRELTLTVLDIVSLFPNYDSRTYPIRTVSQLTREIYTNPVLENFDGSFRGMAQRIEQNIRQPHLMDLLNSITIYTDVHRGFNYWSGHQITASPVGFAGPEFTFPRYGTMGNAAPPVLISTTGLGIFRTLSSPLYRRIILGSGPNNQNLFVLDGTEFSFASLTADLPSTIYRQRGTVDSLDVIPPQDNSVPARAGFSHRLSHVTMLSQAAGAVYTLRAPTFSWRHRSAEFSNLIPSSQITQIPLTKSINLGSGTSVVKGPGFTGGDILRITSPGQISTLRVTITAPLSQRYRVRIRYASTTNLQFHTSIDGRPINQGNFSATMSSGGNLQSGSFRTAGFTTPFNFSNGSSIFTLSAHVFNSGNEVYIERIEFVPAEVTFEAEYDLERAQEAVNALFTSSNQLGLKTNVTDYHIDQVSNLVECLSGEFCLDEKRELSEKVKHANRLSDERNLLQDPNFRGINRQPDRGWRGSTDITIQGGDDVFKENYVTLPGTFNECYPTYLYQKIDESKLKAYTRYQLRGYIEDSQHLEIYLIRYNTKHETVNVPGTGSLWPLSVENPIGKCGEPNRCAPQLEWNPDLDCSCRDGEKCAHHSHHFSLDIDIGCTDLNENLGVWVIFKIKMQDGHARLGNLEFLEEKPLVGESLARVKRAEKKWRDKREKLQVETNIVYKEAKESVDALFVNSQYDRLQADTDIAMIHAADKRVHRIREAYLPELSVIPGVNAGIFEELEGRIFTAYSLYDARNVIKNGDFNNGLSCWNVKGHVDVEEQNNHRSVLVVPEWEAEVSQEVRVCPGRGYILRVTAYKEGYGEGCVTIHEIEDNTDELKFSNCVEEEVYPNNTVTCNDYTANQEEYGGAYTSRNRGYGESYESNSSIPAEYAPVYEEAYIDGRKENPCESNRGYGDYTPLPAGYVTKELEYFPETDKVWIEIGETEGTFIVDSVELLLMEE

SEQ ID NO: 128 - protein, 1179 aa, Bacillus thuringiensis PS81RR1
MEIMNNQNQCVPYNCLNDPTIEILEGERIETGYTPIDISLSLTQFLLSEFVPGAGFVLGLIDLIWGFVGPSQWDAFLVQIEQLINQRIEEFARNQAISRLEGLSNLYQIYAEAFREWEADPTNPALTEEMRIQFNDMNSALTTAIPLFTVQNYQVPLLSVYVQAANLHLSVLRDVSVFGQRWGFDVATINSRYNDLTRLIGTYTDYAVRWYNTGLERVWGPDSRDWVRYNQFRRELTLTVLDIVSLFPNYDSRTYPIRTVSQLTREIYTNPVLENFDGSFRGMAQRIEQNIRQPHLMDLLNSITIYTDVHRGFNYWSGHQITASPVGFAGPEFTFPRYGTMGNAAPPVLISTTGLGIFRTLSSPLYRRIILGSGPNNQNLFVLDGTEFSFASLTADLPSTIYRQRGTVDSLDVIPPQDNSVPARAGFSHRLSHVTMLSQAAGAVYTLRAPTFSWRHRSAEFSNLIPSSQITQIPLTKSINLGSGTSVVKGPGFTGGDILRRTSPGQISTLRVTITAPLSQRYRVRIRYASTTNLQFHTSIDGRPINQGNFSATMSSGGNLQSGSFRTAGFTTPFNFSNGSSIFTLSAHVFNSGNEVYIDRIEFVPAEVTFEAEYDLERAQEAVNALFTSSNQLGLKTNVTDYHIDQVSNLVECLSGEFCLDEKRELSEKVKHAKRLSDERNLLQDPNFRGINRQPDRGWRGSTDITIQGGDDVFKENYVTLPGTFNECYPTYLYQKIDESKLKAYTRYQLRGYIEDSQDLEIYLIRYNTKHETVNVPGTGSLWPLSVENPIGKCGEPNRCAPQLEWNPDLDCSCRDGEKCAHHSHHFSLDIDIGCTDLNENLGVWVIFKIKTQDGHARLGNLEFLEEKPLVGESLARVKRAEKKWRDKREKLQVQTNIVYKEAKESVDALFVNSQYDRLQADTDIAMIHAADKRVHRIREAYLPELSVIPGVNAGIFEELEGRIFTAYSLYDARNLIKNGDFNNGLSCWNVKGHVDVEEQNNHRSVLVVPEWEAEVSQEVRVCPGRGYILRVTAYKEGYGEGCVTIHEIEDNTDELKFSNCVEEEVYPNNTVTCNDYTANQEQYGGAYTSRNRGYGESYESNSSIPAEYAPVYEEAYIDGRKENPCESNRGYGDYTPLPAGYVTKELEYFPETDKVWIEIGETEGTFIVDSVELLLMEE

SEQ ID NO: 129 - protein, 1181 aa, Bacillus thuringiensis alesti
MDNNPKINECIPYNCLSNPEVEVLGGERIETGYTPIDISLSLTQFLLSEFVPGAGFVLGLIDLIWGFVGPSQWDAFLVQIEQLISQRIEEFARNQAISRLEGLSNLYQIYAEAFREWEADPTNPALREEMRIQFNDMNSALTTAIPLFTVQNYQVPLLSVYVQAVNLHLSVLRDVSVFGQRWGLDVATINSRYNDLTRLIGTYTDYAVRWYNTGLERVWGPDSRDWVRYNQFRRELTLTVLDIVSLFPNYDSRTYPIRTVSQLTREIYTNPVLENFDGSFRGSAQRIEQSIRSPHLMDILNSITIYTDAHGGYYYWSGHQIMASPVGFSGPEFTFPLYGTMGNAAPQQRIVAQLGQGVYRTLSSTFYRNPFIIGINNQRLSVLDGTEFAYGSSSNLPSAVYRKSGTVDSLDEIPPQDNNVPPRQGFSHRLSHVSMFRSGFSNSSVSIIRAPMFSWIHRSAEFNNIIPSSQITQIPLTKSTNLGSGTSVVKGPGFTGGDILRRTSPGQISTLRVNITAPLSQRYRVRIRYASTTNLQFHTSIDGRPINQGNFSATMSSGGNLQSGSFRTVGFTTPFNFSNGSSVFTLSAHVFNSGNEVYIDRIEFVPAEVTFEAEYDLERAQEAVNALFTSPNQIGLKTDVTDYHIDQVSNLVECLSDEFCLDEKRELSEKVKHAKRLSDERNLLQDPNFRGINRQPDRGWRGSTDITIQGGDDVFKENYVTLPGTFDECYPTYLYQKIDESKLKAYTRYELRGYIEDSQDLEIYLIRYNAKHETVNVPGTGSLWPLSFESSIGKCGEPNRCAPHLEWNPDLDCSCRDGEKCAHHSHHFSLDIDVGCIDLNEDLGVWVIFKIKTQDGHARLGNLEFLEEKPLVGEALARVKRAEKKWRDKREKLQLETNIVYKEAKESVDALFVNSQYDQLQADTNIAMIHTADKRVHRIQEAYLPELSVIPGVNAGIFEELEGRIFTAYSLYDARNVIKNGDFNNGLSCWNVKGHVDVEEQNNHRSVLVVPEWEAEVSQEVRVCPGRGYILRVTAYKEGYGEGCVTIHEIENNTDELKFSNCVEEEVYPNNTVTCNEYTANQEEYGGAYTSCNRGYDETYGSNYSVPADYASVYEEKAYTDGRRENPCESNRGYGDYTPLPAGYVTKQLEYFPETDKVWIEIGETEGTFIVDSVELFLMEE

SEQ ID NO: 130 - protein, 911 aa, Bacillus thuringiensis NT0423
MDNNPNINECIPYNCLSNPEVEVLGGERIETGYTPIDISLSLTQFLLSEFVPGAGFVLGLVDIIWEIFSVLSSDAFLVQIEQLINQRIEEFARNQAISRLEGLSNLYQIYAESFREWEADPTNPALREEMRIQFNDMNSALTTAIPLFAVQNYQVPLLSVYVTCNYIISSESVMCGQRSGFDAATINSRYNDLTRLIGNYTDHAVRWYNTGLERVWGPDSRDWIRYNQFRRELTLTVLDIVSLFPNYDSRTYPIRTVSQLTREIYTNPVLENFDGSFRGSAQGIEGSIRSPHLMDILNSITIYTDAHRGEYYWSGHQIMASPVGFSGPEFTFPLYGTMGNSAPQQRIVAQLGQGVYRTLSSTLYRRPFNIGINNQQLSVLDGTEFAYGTSSNLPSAVYRKSGTVDSLDEIPPQNNNVPPRQGFSHRLSHVSMFRSGFSNSSVSIIRAPMFSWIHRSAEFNNIIPSSQITQIPLTKSTNLGSGTSVVKGPGFTGGDILRRTSPGQISTLRVNITAPLSQRYRVRILYASTTNLQFHTSIDGRPINQGNFSATMSSGRNLQSGSLRTVGFTTPFNFSNGSSVFTLSAHVFNSGNEVYIDRIEFVPAEVTFEAEYDLERAQKAVNELFTSSNQIGLKTDVTDYHIDQVSNLVECLSDEFCLDEKKELSEKVKHAKRLSDERNLLQDPNFRGINRQLDRGWRRSTDITTQGGDDFFQENYVTLLGTLMGFPSIYIKKWWFEIKSLYPLPIRGYIEDSQDLEIYLIRYNAKHETVNVPGTVPYGRFQPQVPIGKCAHHSHHFSLDIDVGCTDLNEDLGVWVIFKIKTQDGHARLGNLEFLEEKPLVGEALARVKRAEKKWRDKREKLEWETNIVYKEAKESVDALFVNSQYDRLQADTNIAMIHAADKRVHSIREA

SEQ ID NO: 131 - protein, 1176 aa, Bacillus thuringiensis
MDNNPNINECIPYNCLSNPEVEVLGGERIETGYTPIDISLSLTQFLLSEFVPGAGFVLGLVDIIWGIFGPSQWDAFLVQIEQLINQRIEEFARNQAISRLEGLSNLYQIYAESFREWEADPTNPALREEMRIQFNDMNSALTTAIPLLAVQNYQVPLLSVYVQAANLHLSVLRDVSVFGQRWGFDAATINSRYNDLTRLIGNYTDYAVRWYNTGLERVWGPDSRDWVRYNQFRRELTLTVLDIVALFSNYDSRRYPIRTVSQLTREIYTNPVLENFDGSFRGMAQRIEPEYRQPHLMDILNSISIYTDVHRGFNYWSGHQITTSPVGFSGPEFTFPLYGTYGNAAPPQRIAQTGLGIFRTLSSPLYRRIILGSGPNNQELFVLDGTEFSFASLTTNLPSTIYRQRGTVDSLDVIPPQDNSVPPRAGFSHRLSHVPMLSQAAGAVYTLRASLFLLLVLLIHARSIFNNIIPSSQITQSFKKIISWTSVVKGPGFTGGDILRRPSPGLISTLRVNITAPLSQRYRVRIRYAFTTNLQFLTSIDGRPINQGNFYATMSSGSNLQSGSFRTVGFTTPFNFSNGSSVFTLSAHVFNSGNEVYIDRIEFVPAEVTFEAEYDLERAQNGVNQLFTSSNQIGLKTDGTDYHIDQVSNLVECLSDEFCLDEKQELSEKVKHAKRLSDERNLLQDPNFRGINRQLDRGWRGSHDITIQGGDDVFKENYVTLLGTFDECYPTYLYQKIDQSKLKAYTSYQLRGYIEDSQDLEIYLIGYNAKQQTVNVPGTGSLWPVYAPKPIGKCGEPNRCAPHLEWNPDLDCSCRDGEKCAHHSLHFSIDIDVGCTDLNEDLGVWVIFKIKTEDGHARLGNLEFLEEKPLVGEALARVKRAEKKWRDKRVKLEWETNIVYKEAKESVDALFVNSQYDQLQADTNIAMIHAADKRVHSIREAYLPELSVIPGVNAAIFEELEGRIFTAFSLYDARNVIKNGDFNNGLSCWNVKGHVDVEEQNNQRSVLVVPEWEAEVSQEVRVCPGRGYFPRVTAYKEGYGEGCVTIHEIENNTDELKFSNCVEEEIYPNNTVTCNDYTVNQEEYGGAYTSRNRGYNEAPSVPADYASVYEEKSYTDGRRENPCEFNRGYRDYTGLPVGYVTKALEYFPETDKVWIEIGETEGTFIVDSVELLLMEE

SEQ ID NO: 132 - protein, 1182 aa, Bacillus thuringiensis
MKNSIKLSELWYFNERKWRYFMEIVNNQNQCVPYNCLNNPEIEILEGGRISVGNTPIDISLSLTQFLLSEFVPGAGFVLGLIDLIWGFVGPSQWDAFLAQVEQLINQRIAEAVRNTAIQELEGMARVYRTYATAFAEWEKAPDDPELREALRTQFTATETYISGRISVLKIQTFEVQLLSVFAQAANLHLSLLRDVVFFGQRWGFSTTTVNNYYNDLTEGISTYTDYAVRWYNTGLERVWGPDSRDWVRYNQFRRELTLTVLDIVALFPNYDSRRYPIRTVSQLTREIYTNPVLENFDGSFRGSAQGIERSIRSPHLMDILNSITIYTDAHRGYYYWSGHQIMASPVGFSGPEFTFPLYGTMGNAAPQQRIVAQLGQGVYRTLSSTFYRRPFNIGINNQQLSVLDGTEFAYGTSSNLPSAVYRKSGTVDSLDEIPPQNNNVPPRQGFSHRLSHVSMFRSGSSSSVSIIRAPMFSWIHRSAEFNNIIASDSITQIPAVKGNFLFNGSVISGPGFTGGDLVRLNSSGNNIQNRGYIEVPIHFPSTSTRYRVRVRYASVTPIHLNVNWGNSSIFSNTVPATATSLDNLQSSDFGYFESANAFTSSLGNIVGVRNFSGTAGVIIDRFEFIPVTATLEAEYNLERAQKAVNALFTSTNQLGLKTNVTDYHIDQVSNLVTCLSDEFCLDEKRELSEKVKHAKRLSDERNLLQDSNFKDINRQPERGWGGSTGITIQGVDDVFKENYVTLSGTFDECYPTYLYQKIDESKLKAFTRYQLRGYIEDSQDLEVYLIRYNAKHETLNVPGTGSLWPLAVKSPIGRCGEPNRCAHHSHHFSLDIDVGCTDLNEDLGVWVIFKIKTQDGHAKIGNLEFLEEKLLLGEALARVKKAEKKWRDKREKLEWETNIVYKEAKESVDALFVDSQYNRLQTDTNIAMIHAADKRVHRIREAYLPELSVIPGVNAAIFEELEGLIFTAFSLYDARNVIKNGDFNYGLSCWNVKGHVDVEEQNNHRSVLVIPEWEAEVSQEVRVCPGRGYILRVTAYKEGYGEGCVTIHEIEDNTDELKFSNCVEEEVYPNNTVTCNDYTATQEEYEGTYTSRNRGYDGAYESNSSVPADYASAYEEKAYTDGRRDNPCESNRGYRDYTPLPAGYVTKELEYFPETDKVWIEIGETEGTFIVDSVELLLMEE

SEQ ID NO: 133 - protein, 850 aa, Bacillus thuringiensis alesti
MEIVNNQNQCVPYNCLNNPEIEILEGGRISVGNTPIDISLSLTQFLLSEFVPGAGFVLGLIDLIWGFVGPSQWDAFLAQVEQLINQRIAEAVRNTAIQELEGMARVYRTYATAFAEWEKAPDDPELREALRTQFTATETYISGRISVLKIQTFEVQLLSVFAQAANLHLSLLRDVVFFGQRWGFSTTTVNNYYNDLTEGISTYTDYAVRWYNTGLERVWGPDSRDWVRYNQFRRELTLTVLDIVALFPNYDSRRYPIRTVSQLTREIYTNPVLENFDGSFRGSAQGIERSIRSPHLMDILNSITIYTDAHRGYYYWSGHQIMASPVGFSGPEFTFPLYGTMGNAAPQQRIVAQLGQGVYRTLSSTFYRRPFNIGINNQQLSVLDGTEFAYGTSSNLPSAVYRKSGTVDSLDEIPPQNNNVPPRQGFSHRLSHVSMFRSGSSSSVSIIRAPMFSWIHRSAEFNNIIASDSITQIPAVKGNFLFNGSVISGPGFTGGDLVRLNSSGNNIQNRGYIEVPIHFPSTSTRYRVRVRYASVTPIHLNVNWGNSSIFSNTVPATATSLDNLQSSDFGYFESANAFTSSLGNIVGVRNFSGTAGVIIDRFEFIPVTATLEAEYNLERAQKAVNALFTSTNQLGLKTNVTDYHIDQVSNLVTCLSDEFCLDEKRELSEKVKHAKRLSDERNLLQDSNFKDINRQPERGWGGSTGITIQGGDDVFKENYVTLSGTFDECYPTYLYQKIDESKLKAFTRYQLRGYIEDSQDLEVYLIRYNAKHETLNVPGTGSLWPLAVKSPIGRCGEPNRCAHHSHHFSLDIDVGCTDLNEDLGVWVIFKIKTQDGHAKIGNLEFLEEKL

SEQ ID NO: 134 - protein, 1181 aa, Bacillus thuringiensis
MDNNPNINECIPYNCLSNPEVEVLGGERIETGYTPIDISLSLTQFLLSEFVPGAGFVLGLVDIIWGIFGPSQWDAFLVQIEQLINQRIEEFARNQAISRLEGLSNLYQIYAESFREWEADPTNPALREEMRIQFNDMNSALTTAIPLFAVQNYQVPLLSVYVQAANLHLSVLRDVSVFGQRWGFDAATINSRYNDLTRLIGNYTDYAVRWYNTGLERVWGPDSRDWVRYNQFRRELTLTVLDIVALFSNYDSRRYPIRTVSQLTREIYTNPVLENFDGSFRGMAQRIEQNIRQPHLMDILNSITIYTDVHRGFNYWSGHQITASPVGFSGPEFAFPLFGNAGNAAPPVLVSLTGLGIFRTLSSPLYRRIILGSGPNNQELFVLDGTEFSFASLTTNLPSTIYRQRGTVDSLDVIPPQDNSVPPRAGFSHRLSHVTMLSQAAGAVYTLRAPTFSWQHRSAEFNNIIASDSITQIPAVKGNFLFNGSVISGPGFTGGDLVRLNSSGNNIQNRGYIEVPIHFPSTSTRYRVRVRYASVTPIHLNVNWGNSSIFSNTVPATATSLDNLQSSDFGYFESANAFTSSLGNIVGVRNFSGTAGVIIDRFEFIPVTATLEAEYNLERAQKAVNALFTSTNQLGLKTNVTDYHIDQVSNLVTCLSDEFCLDEKRELSEKVKHAKRLSDERNLLQDSNFKDINRQPERGWGGSTGITIQGGDDVFKENYVTLSGTFDECYPTYLYQKIDESKLKAFTRYQLRGYIEDSQDLEVYLIRYNAKHETLNVPGTGSLWPLAVKSPIGRCGEPNRCAPRIEWKPDVDCSCRDGEKCAHHSHHFSLDIDVGCTDLNEDLGVWVIFKIKTQDGHAKIGNLEFLEEKLLLGEALARVKKAEKKWRDKREKLEWETNIVYKEAKESVDALFVDSQYNRLQTDTNIAMIHAADKRVHRIREAYLPELSVIPGVNAAIFEELEGLIFTAFSLYDARNVIKNGDFNYGLSCWNVKGHVDVEEQNNHRSVLVIPEWEAEVSQEVRVCPGRGYILRVTAYKEGYGEGCVTIHEIEDNTDELKFSNCVEEEVYPNNTVTCNDYTATQEEYEGTYTSRNRGYDGAYESNSSVPADYASAYEEKAYTDGRRDNPCESNRGYRDYTPLPAGYVTKELEYFPETDKVWIEIGETEGTFIVDSVELLLMEE

SEQ ID NO: 135 - protein, 1155 aa, Bacillus thuringiensis kunthala nags3
MDNNPNINECIPYNCLSNPEVEVLGGERIETGYTPIDISLSLTQFLLSEFVPGAGFVLGLVDIIWGIFGPSQWDAFLVQIEQLINQRIENSLGTKPFLDWKAKQSLSNLRRIFREWEADPTNPALREEMRIQFNARTSALTTAIPLFAVQNYQVPLLSVYVQAANLMFSTRRVQPFSRVVAVTPGYQSRYNFKRCYWGAREFLEDVGAIRDKSNFKKEDSKQLCCYLGIFRLSSYFFKIYEKFRTRVYPISESKFSPINKRNLYKPSIKKFSMVVFEARLRARRKYWSPHLWIYLNQDNHLTDVHRGFNYWSGHQIIASPVGFQDPEFAFPLFGNAGNAAPPVRIVYQLGQGVYRTLSSTLYEDLFIRDKVINTYLFLAGSNLLMEPPHICHPGRYRKSGTVDSLDEIPHQNNNVPPRQGFSHRLSHVSMFRSGFSNSSVSIIRAPMFSWILRSAEFNNIIPSSQITQIPLTKSTNLGSGTSVVKGPGFTGGDILRRTSPGQISTLRVNITAPLSQRYRVRIRYASTTNLQFHTSIDGRPINQGNFSATMSSGSNLQSASFRTVGFTTPFNFSNGSSVFTLSAHVFNSGNEVYIDRIEFVPAEVTFEAEYDLERAQKAVNELFTSSNQIGLKTDVTDYHIDQVSNLVECLSDEFCLDEKQELSEKVKHAKRLSDERNLLQDPNFRGINRQLDRGWRGSTDITIQGGDDVFKENYVTLLGTFDECYPTYLYQKIDESKLKAYTRYQLRGYIEDSQDLESIYIRESVESESVDAPRMESDLRLFGRDGQKMCPSFPSFLLRHYVGCTDLNEDLGVWVIFKIKTQDGHARLGNLEFLEEKPLVGEALARVKRAEKKWRDKREKLEWETNIVYKEAKESVHALFVNSQYDQLQAETNIAMIHAADKRVHSIRKAYLPELAVIPGVNAGIFEELEGRIFTAFSLYDARNVIKNGAFEYMAYPAGTERACRCRRTKQPPFGPCCSGMGSRSVTRSSCLSGSWLYPSCHSVQGGIGEGCVTIHEIENNTDELKFSNCVEEEVYPNNTVTCKIILRLKKNRRVPYTSRNRGYDGAYESNSSVQLIMHQPMKKKHIQMDEETILVNLTEDMGITHHYQRGYVTKELEYFQKPIRYGLRSEKRKEHSSWTAWNYFLWRNNICFIM

SEQ ID NO: 136 - protein, 1228 aa, Bacillus thuringiensis thuringiensis HD2
MTSNRKNENEIINAVSNHSAQMDLLPDARIEDSLCIAEGNNIDPFVSASTVQTGINIAGRILGVLGVPFAGQLASFYSFLVGELWPRGRDQWEIFLEHVEQLINQQITENARNTALARLQGLGDSFRAYQQSLEDWLENRDDARTRSVLYTQYIALELDFLNAMPLFAIRNQEVPLLMVYAQAANLHLLLLRDASLFGSEFGLTSQEIQRYYERQVERTRDYSDYCVEWYNTGLNSLRGTNAASWVRYNQFRRDLTLGVLDLVALFPSYDTRTYPINTSAQLTREVYTDAIGATGVNMASMNWYNNNAPSFSAIEAAAIRSPHLLDFLEQLTIFSASSRWSNTRHMTYWRGHTIQSRPIGGGLNTSTHGATNTSINPVTLRFASRDVYRTESYAGVLLWGIYLEPIHGVPTVRFNFTNPQNISDRGTANYSQPYESPGLQLKDSETELPPETTERPNYESYSHRLSHIGIILQSRVNVPVYSWTHRSADRTNTIGPNRITQIPMVKASELPQGTTVVRGPGFTGGDILRRTNTGGFGPIRVTVNGPLTQRYRIGFRYASTVDFDFFVSRGGTTVNNFRFLRTMNSGDELKYGNFVRRAFTTPFTFTQIQDIIRTSIQGLSGNGEVYIDKIEIIPVTATFEAEYDLERAQEAVNALFTNTNPRRLKTDVTDYHIDQVSNLVACLSDEFCLDEKRELLEKVKYAKRLSDERNLLQDPNFTSINKQPDFISTNEQSNFTSIHEQSEHGWWGSENITIQEGNDVFKENYVTLPGTFNECYPTYLYQKIGESELKAYTRYQLRGYIEDSQDLEIYLIRYNAKHETLDVPGTESLWPLSVESPIGRCGEPNRCAPHFEWNPDLDCSCRDGEKCAHHSHHFSLDIDVGCTDLHENLGVWVVFKIKTQEGHARLGNLEFIEEKPLLGEALSRVKRAEKKWRDKREKLQLETKRVYTEAKEAVDALFVDSQYDRLQADTNIGMIHAADKLVHRIREAYLSELPVIPGVNAEIFEELEGHIITAISLYDARNVVKNGDFNNGLTCWNVKGHVDVQQSHHRSDLVIPEWEAEVSQAVRVCPGCGYILRVTAYKEGYGEGCVTIHEIENNTDELKFKNREEEEVYPTDTGTCNDYTAHQGTAGCADACNSRNAGYEDAYEVDTTASVNYKPTYEEETYTDVRRDNHCEYDRGYVNYPPVPAGYVTKELEYFPETDTVWIEIGETEGKFIVDSVELLLMEE

SEQ ID NO: 137 - protein, 1228 aa, Bacillus thuringiensis entomocidus HD110
MTSNRKNENEIINAVSNHSAQMDLLPDARIEDSLCIAEGNNIDPFVSASTVQTGINIAGRILGVLGVPFAGQLASFYSFLVGELWPRGRDQWEIFLEHVEQLINQQITENARNTALARLQGLGDSFRAYQQSLEDWLENRDDARTRSVLHTQYIALELDFLNAMPLFAIRNQEVPLLMVYAQAANLHLLLLRDASLFGSEFGLTSQEIQRYYERQVERTRDYSDYCVEWYNTGLNSLRGTNAASWVRYNQFRRDLTLGVLDLVALFPSYDTRTYPINTSAQLTREVYTDAIGATGVNMASMNWYNNNAPSFSAIEAAAIRSPHLLDFLEQLTIFSASSRWSNTRHMTYWRGHTIQSRPIGGGLNTSTHGATNTSINPVTLRFASRDVYRTESYAGVLLWGIYLEPIHGVPTVRFNFTNPQNISDRGTANYSQPYESPGLQLKDSETELPPETTERPNYESYSHRLSHIGIILQSRVNVPVYSWTHRSADRTNTIGPNRITQIPMVKASELPQGTTVVRGPGFTGGDILRRTNTGGFGPIRVTVNGPLTQRYRIGFRYASTVDFDFFVSRGGTTVNNFRFLRTMNSGDELKYGNFVRRAFTTPFTFTQIQDIIRTSIQGLSGNGEVYIDKIEIIPVTATFEAEYDLERAQEAVNALFTNTNPRRLKTDVTDYHIDQVSNLVACLSDEFCLDEKRELLEKVKYAKRLSDERNLLQDPNFTSINKQPDFISTNEQSNFTSIHEQSEHGWWGSENITIQEGNDVFKENYVTLPGTFNECYPTYLYQKIGESELKAYTRYQLRGYIEDSQDLEIYLIRYNAKHETLDVPGTESLWPLSVESPIGRCGEPNRCAPHFEWNPDLDCSCRDGEKCAHHSHHFSLDIDVGCTDLHENLGVWVVFKIKTQEGHARLGNLEFIEEKPLLGEALSRVKRAEKKWRDKREKLQLETKRVYTEAKEAVDALFVDSQYDRLQADTNIGMIHAADKLVHRIREAYLSELPVIPGVNAEIFEELEGHIITAISLYDARNVVKNGDFNNGLTCWNVKGHVDVQQSHHRSDLVIPEWEAEVSQAVRVCPGCGYILRVTAYKEGYGEGCVTIHEIENNTDELKFKNREEEEVYPTDTGTCNDYTAHQGTAGCADACNSRNAGYEDAYEVDTTASVNYKPTYEEETYTDVRRDNHCEYDRGYVNYPPVPAGYVTKELEYFPETDTVWIEIGETEGKFIVDSVELLLMEE

SEQ ID NO: 138 - protein, 1228 aa, Bacillus thuringiensis
MTSNRKNENEIINAVSNHSAQMDLLPDARIEDSLCIAEGNNIDPFVSASTVQTGINIAGRILGVLGVPFAGQLASFYSFLVGELWPRGRDQWEIFLEHVEQLINQQITENARNTALARLQGLGDSFRAYQQSLEDWLENRDDARTRSVLYTQYIALELDFLNAMPLFAIRNQEVPLLMVYAQAANLHLLLLRDASLFGSEFGLTSQEIQRYYERQVERTRDYSDYCVEWYNTGLNSLRGTNAASWVRYNQFRRDLTLGVLDLVALFPSYDTRTYPINTSAQLTREVYTDAIGATGVNMASMNWYNNNAPSFSAIEAAAIRSPHLLDFLEQLTIFSASSRWSNTRHMTYWRGRTIQSRPIGGGLNTSTHGATNTSINPVTLRFASRDVYRTESYAGVLLWGIYLEPIHGVPTVRFNFTNPQNISDRGTANYSQPYESPGLQLKDSETELPPETTERPNYESYSHRLSHIGIILQSRVNVPVYSWTHRSADRTNTIGPNRITQIPMVKASELPQGTTVVRGPGFTGGDILRRTNTGGFGPIRVTVNGPLTQRYRIGFRYASTVDFDFFVSRGGTTVNNFRFLRTMNSGDELKYGNFVRRAFTTPFTFTQIQDIIRTSIQGLSGNGEVYIDKIEIIPVTATFEAEYDLERAQEAVNALFTNTNPRRLKTDVTDYHIDQVSNLVACLSDEFCLDEKRELLEKVKYAKRLSDERNLLQDPNFTSINKQPDFISTNEQSNFTSIHEQSEHGWWGSENITIQEGNDVFKENYVTLPGTFNECYPTYLYQKIGESELKAYTRYQLRGYIEDSQDLEIYLIRYNAKHETLDVPGTESLWPLSVESPIGRCGEPNRCAPHFEWNPDLDCSCRDGEKCAHHSHHFSLDIDVGCTDLHENLGVWVVFKIKTQEGHARLGNLEFIEEKPLLGEALSRVKRAEKKWRDKREKLQLETKRVYTEAKEAVDALFVDSQYDRLQADTNIGMIHAADKLVHRIREAYLSELPVIPGVNAEIFEELEGHIITAISLYDARNVVKNGDFNNGLTCWNVKGHVDVQQSHHRSDLVIPEWEAEVSQAVRVCPGCGYILRVTAYKEGYGEGCVTIHEIENNTDELKFKNREEEEVYPTDTGTCNDYTAHQGTAGCADACNSRNAGYEDAYEVDTTASVNYKPTYEEETYTDVRRDNHCEYDRGYVNYPPVPAGYVTKELEYFPETDTVWIEIGETEGKFIVDSVELLLMEE

SEQ ID NO: 139 - protein, 1228 aa, Bacillus thuringiensis entomocidus HD9; identical to SEQ ID NO: 137

SEQ ID NO: 140 - protein, 1228 aa, Bacillus thuringiensis sfw-12; identical to SEQ ID NO: 136

SEQ ID NO: 141 - protein, 1228 aa, Bacillus thuringiensis S601
MTSNRKNENEIINAVSNHSAQMDLLPDARIEDSLCIAEGNNIDPFVSASTVQTGINIAGRILGVLGVPFAGQLASFYSFLVGELWPRGRDQWEIFLEHVEQLINQQITENARNTALARLQGLGDSFRAYQQSLEDWLENRDDARTRSVLYTQYIALELDFLNAMPLFAIRNQEVPLLMVYAQAANLHLLLLRDASLFGSEFGLTSQEIQRYYERQVERTRDYSDYCVEWYNTGLNSLRGTNAASWVRYNQFRRGLTLGVLGLVALFPSYDTRTYPINTSAQLTREVYTDAIGATGVNMASMNWYNNNAPSFSAIEAAAIRSPHLLDFLEQLTIFSASSRWSNTRHMTYWRGHTIQSRPIGGGLNTSTHGATNTSINPVTLRFASRDVYRTESYAGVLLWGIYLEPIHGVPTVRFNFTNPQNISDRGTANYSQPYESPGLQLKDSETELPPETTERPNYESYSHRLSHIGIILQSRVNVPVYSWTHRSADRTNTIGPNRITQIPMVKASELPQGTTVVRGPGFTGGDILRRTNTGGFGPIRVTVNGPLTQRYRIGFRYASTVDFDFFASRGGTTVNNFRFLRTMNSGDELKYGNFVRRAFTTPFTFTQIQNIIRTSIQGLSGNGEVYIDKIEIIPVTATFEAEYDLERAQEAVNALFTNTNPRRLKTDVTDYHIDQVSNLVACLSDEFCLDEKRELLEKVKYAKRLSDERNLLQDPNFTSINKQPDFISTNEQSNFTSIHEQSEHGWWGSENITIQEGNDVSKENYVTLPGTFNECYPTYLYQKIGESELKAYTRYQLEGYIEDSQDLEIYLIRYNAKHETLDVPGTESLWPLSVESPIGRCGEPNRCAPHFEWNPDLDCSCRDGEKCAHHSHHFSLDIDVGCTDLHENLGVWVVFKIKTQEGHARLGNLEFIEEKPLLGEALSRVKRAEKKWRDKREKLQLETKRVYTEAKEAVDALFVDSQYDRLQADTNIGMIHAADKLVHRIREAYLSELPVIPGVNAEIFEELEGHIITAISLYDARNVVKNGDFNNGLTCWNVKGHVDVQQSHHRSDLVIPEWEAEVSQAVRVCPGCGYILSVTAYKEGYGEGCVTIHEIENNTDELKFKNREEEEVYPTDTGTCNDYTAHQGTAGCADACNSRNAGYEDAYEVDTTASVNYKPTYEEETYTDVRRDNHCEYDRGYVNYPPVPAGYVTKELEYFPETDTVWIEIGETEGKFMVDSVELLLMEE

SEQ ID NO: 142 - protein, 1229 aa, Bacillus thuringiensis EG5847
MTSNRKNENEIINALSIPTVSNPSTQMNLSPDARIEDSLCVAEVNNIDPFVSASTVQTGINIAGRILGVLGVPFAGQLASFYSFLVGELWPSGRDPWEIFLEHVEQLIRQQVTENTRNTAIARLEGLGRGYRSYQQALETWLDNRNDARSRSIILERYVALELDITTAIPLFRIRNEEVPLLMVYAQAANLHLLLLRDASLFGSEWGMASSDVNQYYQEQIRYTEEYSNHCVQWYNTGLNNLRGTNAESWLRYNQFRRDLTLGVLDLVALFPSYDTRTYPINTSAQLTREIYTDPIGRTNAPSGFASTNWFNNNAPSFSAIEAAIFRPPHLLDFPEQLTIYSASSRWSSTQHMNYWVGHRLNFRPIGGTLNTSTQGLTNNTSINPVTLQFTSRDVYRTESNAGTNILFTTPVNGVPWARFNFINPQNIYERGATTYSQPYQGVGIQLFDSETELPPETTERPNYESYSHRLSHIGLIIGNTLRAPVYSWTHRSADRTNTIGPNRITQIPLVKALNLHSGVTVVGGPGFTGGDILRRTNTGTFGDIRLNINVPLSQRYRVRIRYASTTDLQFFTRINGTTVNIGNFSRTMNRGDNLEYRSFRTAGFSTPFNFLNAQSTFTLGAQSFSNQEVYIDRVEFVPAEVTFEAEYDLERAQKAVNALFTSTNPRRLKTDVTDYHIDQVSNMVACLSDEFCLDEKRELFEKVKYAKRLSDERNLLQDPNFTFISGQLSFASIDGQSNFPSINELSEHGWWGSANVTIQEGNDVFKENYVTLPGTFNECYPNYLYQKIGESELKAYTRYQLRGYIEDSQDLEIYLIRYNAKHETLDVPGTDSLWPLSVESPIGRCGEPNRCAPHFEWNPDLDCSCRDGERCAHHSHHFTLDIDVGCTDLHENLGVWVVFKIKTQEGYARLGNLEFIEEKPLIGEALSRVKRAEKKWRDKREKLQLETKRVYTEAKEAVDALFVDSQYDQLQADTNIGMIHAADKLVHRIREAYLSELPVIPGVNAEIFEELEGHIITAMSLYDARNVVKNGDFNNGLTCWNVKGHVDVQQSHHRSDLVIPEWEAEVSQAVRVCPGRGYILRVTAYKEGYGEGCVTIHEIENNTDELKFKNCEEEEVYPTDTGTCNDYTAHQGTAACNSRNAGYEDAYEVDTTASVNYKPTYEEETYTDVRRDNHCEYDRGYVNYPPVPAGYVTKELEYFPETDTVWIEIGETEGKFIVDSVELLLMEE

SEQ ID NO: 143 - protein, 1233 aa, Bacillus thuringiensis morrisoni
MTSNRKNENEIINALSIPTVSNPSTQMNLSPDARIEDSLCVAEVNNIDPFVSASTVQTGINIAGRILGVLGVPFAGQLASFYSFLVGELWPSGRDPWEIFLEHVEQLIRQQVTENTRNTAIARLEGLGRGYRSYQQALETWLDNRNDARSRSIILERYVALELDITTAIPLFRIRNEEVPLLMVYAQAANLHLLLLRDASLFGSEWGMASSDVNQYYQEQIRYTEEYSNHCVQWYNTGLNNLRGTNAESWLRYNQFRRDLTLGVLDLVALFPSYDTRTYPINTSAQLTREIYTDPIGRTNAPSGFASTNWFNNNAPSFSAIEAAIFRPPHLLDFPEQLTIYSASSRWSSTQHMNYWVGHRLNFRPIGGTLNTSTQGLTNNTSINPVTLQFTSRDVYRTESNAGTNILFTTPVNGVPWARFNFINPQNIYERGATTYSQPYQGVGIQLFDSETELPPETTERPNYESYSHRLSHIGLIIGNTLRAPVYSWTHRSADRTNTIGPNRITQIPLVKALNLHSGVTVVGGPGFTGGDILRRTNTGTFGDIRLNINVPLSQRYRVRIRYASTTDLQFFTRINGTTVNIGNFSRTMNRGDNLEYRSFRTAGFSTPFNFLNAQSTFTLGAQSFSNQEVYIDRVEFVPAEVTFEAEYDLERAQKAVNALFTSTNPRRLKTDVTDYHIDQVSNMVACLSDEFCLDEKRELFEKVKYAKRLSDERNLLQDPNFTFISGQLSFASIDGQSNFPSINELSEHGWWGSANVTIQEGNDVFKENYVTLPGTFNECYPNYLYQKIGESELKAYTRYQLRGYIENSQDLEIYLIRYNAKHEAINVPGTESIWSISAESTIGKCTEPNRCAPHYEWNPDLDCSCRDGEKCAHHSHHSTLDIDVGCTDLHENLGVWLIFKIKTQDGHARLGNLEYLEEKPLLGEALRRVKRTEKKWRDKREKLHLETKRVYTEAKESVDALFVDSQYDRLQANSNIGMIHAADKLVHSIREAYLSELPVIRGVNADIFEELEGHILTAFSLYDARNAVKNGDFNNGLTCWNVKGHVDVQQSHHRFDLVVPEWKAEVSQAVRVCPGCGYILRVTAYKEGYGEGCVTIHEIEENTDELNFKNRVEEEIYPPDTGTCKYYTENQGTRTCGNECGSRNEGYDNAYEINAKSSLEYRPTYEEETYTDVRRENHCEYARGYINYSPVPAGYVTKELEYFPETDTVWIEIGETEGKFIVDSVELLLMEE

SEQ ID NO: 144 - protein, 1231 aa, Bacillus thuringiensis wuhanensis HD525
MTSNRKNENEIINALSIPAVSNHSAQMDLSLDARIEDSLCIAEGNNINPLVSASTVQTGINIAGRILGVLGVPFAGQLASFYSFLVGELWPSGRDPWEIFLEHVEQLIRQQVTENTRNTAIARLEGLGRGYRSYQQALETWLDNRNDARSRSIILERYVALELDITTAIPLFRIRNEEVPLLMVYAQAANLHLLLLRDASLFGSEWGMASSDVNQYYQEQIRYTEEYSNHCVQWYNTGLNNLRGTNAESWLRYNQFRRDLTLGVLDLVALFPSYDTRTYPINTSAQLTREIYTDPIGRTNAPSGFASTNWFNNNAPSFSAIEAAIFRPPHLLDFPEQLTIYSASSRWSSTQHMNYWVGHRLNFRPIGGTLNTSTQGLTNNTSINPVTLQFTSRDVYRTESNAGTNILFTTPVNGVPWARFNFINPQNIYERGATTYSQPYQGVGIQLFDSETELPPETTERPNYESYSHRLSHIGLIIGNTLRAPVYSWTHRSADRTNTIGPNRITQIPAVKGRFLFNGSVISGPGFTGGDVVRLNRNNGNIQNRGYIEVPIQFTSTSTRYRVRVRYASVTSIELNVNLGNSSIFTNTLPATAASLDNLQSGDFGYVEINNAFTSATGNIVGARNFSANAEVIIDRFEFIPVTATFEAEYDLERAQKAVNALFTSTNPRRLKTDVTDYHIDQVSNMVACLSDEFCLDEKRELFEKVKYAKRLSDERNLLQDPNFTFISGQLSFASIDGQSNFTSINELSEHGWWGSENVTIQEGNDVFKENYVTLPGTFNECYPNYLYQKIGESELKAYTRYQLRGYIEDSQDLEIYLIRYNAKHETLDVPGTDSLWPLSVKSPIGRCGEPNRCAPHFEWNPDLDCSCRDGERCAHHSHHFTLDIDVGCTDLHENLGVWVVFKIKTQEGYARLGNLEFIEEKPLIGEALSRVKRAEKKWRDKREKLQLETKRVYTEAKETVDALFVDSHYNRLQADTNIGMIHAADRLVHRIHEAYLPELPFIPGINAVIFEELENRISTAFSLYDARNVIKNGDFNNGLSCWNVKGHVDVQQSHHRSDLVIPEWEAEVSQAVRVCPGRGYILRVTAYKEGYGEGCVTIHEIENNTDELKFKNCEEEEVYPTDTGTCNDYTAHQGTAACNSRNAGYEDAYEVDTTASVNYKPTYEEETYTDVRRDNHCEYDRGYVNYPPVPAGYVTKELEYFPETDTVWIEIGETEGKFIVDSVELLLMEE

SEQ ID NO: 145 - protein, 1231 aa, Bacillus thuringiensis 834
MTSNRKNENEIINALSIPTVSNPSTQMNLSPDARIEDSLCVAEVNNIDPFVSASTVQTGINIAGRILGVLGVPFAGQLASFYSFLVGELWPSGRDPWEIFLEHVEQLIRQQVTENTRNTAIARLEGLGRGYRSYQQALETWLDNRNDARSRSIILERYVALELDITTAIPLFRIRNEEVPLLMVYAQAANLHLLLLRDASLFGSEWGMASSDVNQYYQEQIRYTEEYSNHCVQWYNTGLNNLRGTNAESWLRYNQFRRDLTLGVLDLVALFPSYDTRTYPINTSAQLTREIYTDPIGRTNAPSGFASTNWFNNNAPSFSAIEAAIFRPPHLLDFPEQLTIYSASSRWSSTQHMNYWVGHRLNFRPIGGTLNTSTQGLTNNTSINPVTLQFTSRDVYRTESNAGTNILFTTPVNGVPWDRFNFINPQNIYERGATTYSQPYQGVGIQLFDSETELPPETTERPNYESYSHRLSHIGLIIGNTLRAPVYSWTHRSADRTNTIGPNRITQIPAVKGRFLFNGSVISGPGFTGGDVVRLNRNNGNIQNRGYIEVPIQFTSTSTRYRVRVRYASVTSIELNVNLGNSSIFTNTLPATAASLDNLQSGDFGYVEINNAFTSATGNIVGARNFSANAEVIIDRFEFIPVTATFEAEYDLERAQKAVNALFTSTNPRRLKTDVTDYHIDQVSNMVACLSDEFCLDEKRELFEKVKYAKRLSDERNLLQDPNFTFISGQLSFASIDGQSNFTSINELSEHGWWGSENVTIQEGNDVFKENYVTLPGTFNECYPNYLYQKIGESELKAYTRYQLRGYIEDSQDLEIYLIRYNAKHETLDVPGTDSLWPLSVKSPIGRCGEPNRCAPHFEWNPDLDCSCRDGERCAHHSHHFTLDIDVGCTDLHENLGVWVVFKIKTQEGYARLGNLEFIEEKPLIGEALSRVKRAEKKWRDKREKLQLETKRVYTEAKETVDALFVDSHYNRLQADTNIGMIHAADRLVHRIHEAYLPELPFIPGINAVIFEELENRISTAFSLYDARNVIKNGDFNNGLSCWNVKGHVDVQQSHHRSDLVIPEWEAEVSQAVRVCPGRGYILRVTAYKEGYGEGCVTIHEIENNTDELKFKNCEEEEVYPTDTGTCNDYTAHQGTAACNSRNAGYEDAYEVDTTASVNYKPTYEEETYTDVRRDNHCEYDRGYVNYPPVPAGYVTKELEYFPETDTVWIEIGETEGKFIVDSVELLLMEE

SEQ ID NO: 146 - protein, 1227 aa, Bacillus thuringiensis PS158C2
MTSNRKNENEIINALSIPAVSNHSAQMNLSTDARIEDSLCIAEGNNIDPFVSASTVQTGINIAGRILGVLGVPFAGQIASFYSFLVGELWPRGRDPWEIFLEHVEQLIRQQVTENTRDTALARLQGLGNSFRAYQQSLEDWLENRDDARTRSVLYTQYIALELDFLNAMPLFAIRNQEVPLLMVYAQAANLHLLLLRDASLFGSEFGLTSQEIQRYYERQVEKTREYSDYCARWYNTGLNNLRGTNAESWLRYNQFRRDLTLGVLDLVALFPSYDTRVYPMNTSAQLTREIYTDPIGRTNAPSGFASTNWFNNNAPSFSAIEAAVIRPPHLLDFPEQLTIFSVLSRWSNTQYMNYWVGHRLESRTIRGSLSTSTHGNTNTSINPVTLQFTSRDVYRTESFAGINILLTTPVNGVPWARFNWRNPLNSLRGSLLYTIGYTGVGTQLFDSETELPPETTERPNYESYSHRLSNIRLISGNTLRAPVYSWTHRSADRTNTISSDSITQIPLVKSFNLNSGTSVVSGPGFTGGDIIRTNVNGSVLSMGLNFNNTSLQRYRVRVRYAASQTMVLRVTVGGSTTFDQGFPSTMSANESLTSQSFRFAEFPVGISASGSQTAGISISNNAGRQTFHFDKIEFIPITATFEAEYDLERAQEAVNALFTNTNPRRLKTGVTDYHIDEVSNLVACLSDEFCLDEKRELLEKVKYAKRLSDERNLLQDPNFTSINKQPDFISTNEQSNFTSIHEQSEHGWWGSENITIQEGNDVFKENYVILPGTFNECYPTYLYQKIGEAELKAYTRYQLSGYIEDSQDLEIYLIRYNAKHETLDVPGTESVWPLSVESPIGRCGEPNRCAPHFEWNPDLDCSCRDGEKCAHHSHHFSLDIDVGCIDLHENLGVWVVFKIKTQEGHARLGNLEFIEEKPLLGEALSRVKRAEKKWRDKREKLQLETKRVYTEAKEAVDALFVDSQYDRLQADTNIGMIHAADKLVHRIREAYLSELSVIPGVNAEIFEELEGRIITAISLYDARNVVKNGDFNNGLACWNVKGHVDVQQSHHRSVLVIPEWEAEVSQAVRVCPGRGYILRVTAYKEGYGEGCVTIHEIENNTDELKFKNCEEEEVYPTDTGTCNDYTAHQGTAACNSRNAGYEDAYEVDTTASVNYKPTYEEETYTDVRRDNHCEYDRGYVNYPPVPAGYMTKELEYFPETDKVWIEIGETEGKFIVDSVELLLMEE

SEQ ID NO: 147 - protein, 1227 aa, Bacillus thuringiensis
LTSNRKNENEIINALSIPAVSNHSAQMNLSTDARIEDSLCIAEGNNIDPFVSASTVQTGINIAGRILGVLGVPFAGQIASFYSFLVGELWPRGRDPWEIFLEHVEHLIRQQVTENTRDTALARLQGLGNSFRAYQQSLEDWLENRDDARTRSVLYTQYIALELDFLNAMPLFAIRNQEVPLLMVYAQAANLHLLLLRDASLFGSEFGLTSQEIQRYYERQVEKTREYSDYCARWYNTGLNNLRGTNAESWLRYNQFRRDLTLGVLDLVALFPSYDTRVYPMNTSAQLTREIYTDPIGRTNAPSGFASTNWFNNNAPSFSAIEAAVIRPPHLLDFPEQLTIFSVLSRWSNTQYMNYWVGHRLESRTIRGSLSTWTHGNTNTSINPVTLQFTSRDVYRTESFAGINILLTTPVNGVPWARFNWRNPLNSLRGSLLYTIGYTGVGTQLFDSETELPPETTERPNYESYSHRLSNIRLISGNTLRAPVYSWTHRSADRTNTISSDSITQIPLVKSFNLNSGTSVVSGPGFTGGDIIRTNVNGSVLSMGLNFNNTSLQRYRVRVRYAASQTMVLRVTVGGSTTFDQGFPSTMSANESLTSQSFRFAEFPVGISASGSQTAGISISNNAGRQTFHFDKIEFIPITATFEAEYDLERAQEAVNALFTNTNPRRLKTGVTDYHIDEVSNLVACLSDEFCLDEKRELLEKVKYAKRLSDERNLLQDPNFTSINKQPDFNSNNEQSNFTSIHEQSEHGWWGSENITIQEGNDVFKENYVTLPGTFNECYPTYLYQKIGEAELKAYTRYQLSGYIEDSQDLEIYLIRYNAKHETLDVPGTESVWPLSVESPIGRCGEPNRCAPHFEWNPDLDCSCRDGEKCAHHSHHFSLDIDVGCIDLHENLGVWVVFKIKTQEGHARLGNLEFIEEKPLLGEALSRVKRAEKKWRDKREKLQLETKRVYTEAKEAVDALFVDSQYDRLQADTNIGMIHAADKLVHRIREAYLSELSVIPGVNAEIFEELEGRIITAISLYDARNVVKNGDFNNGLACWNVKGHVDVQQSHHRSVLVIPEWEAEVSQAVRVCPGRGYILRVTAYKEGYGEGCVTIHEIENNTDELKFKNCEEEEVYPTDTGTCNDYTAHQGTAVCNSRNAGYEDAYEVDTTASVNYKPTYEEETYTDVRRDNHCEYDRGYVNYPPVPAGYMTKELEYFPETDKVWIEIGETEGKFIVDSVELLLMEE

SEQ ID NO: 148 - protein, 1227 aa, Bacillus thuringiensis g9
MNSNRKNENEIINALSIPAVSNHSAQMNLSTDARIEDSLCIAEGNNIDPFVSASTVQTGINIAGRILGVLGVPFAGQIASFYSFLVGELWPRGRDPWEIFLEHVEQLIRQQVTENTRDTALARLQGLGNSFRAYQQSPEDWLGNRDDARTRSVLYTQYIALELDFLNAMPLFAIRNQEVPLLMVYAQAANLHLLLLRDASLFGSEFGLTSQEIQRYYERQVEKTREYSDYCARWYNTGLNNLRGTNAESWLRYNQFRRDLTLGVLDLVALFPSYDTRVYPMNTSAQLTREIYTDPIGRTNAPSGFASTNWFNNNAPSFSAIEAAVIRPPHLLDFPEQLTIFSVLSRWSNTQYMNYWVGHRLESRTIRGSLSTSTHGNTNTSINPVTLQFTSRDVYRTESLAGINILLTTPVNGVPWARFNWRNPLNSLRGSLLYTIGYTGVGTQLFDSETELPPETTERPNYESYSHRLSNIRLISGNTLRAPVYSWTHRSADRTNTISSDSITQIPLVKSFNLNSGTSVVSGPGFTGGDIIRTNVNGSVLSMGLNFNNTSLQRYRVRVRYAASQTMVLRVTVGGSTTFDQGFPSTMSANESLTSQSFRFAEFPVGISASGSQTAGISISNNAGRQTFHFDKIEFIPITATFEAEYDLERAQEAVNALFTNTNPRRLKTGVTDYHIDEVSNLVACLSDEFCLDEKRELLEKVKYAKRLSDERNLLQDPNFTSINKQPDFISTNEQSNFTSIHEQSEHGWWGSENITIQEGNDVFKENYVTLPGTFNECYPTYLYQKIGESELKAYTRYQLSGYIEDSQDLEIYLIRYNAKHETLDVPGTESVWSLSVESPIGRCGEPNRCAPHFEWNPDLDCSCRDGEKCAHHSHHFSLDIDVGCIDLHENLGVWVVFKIKTQEGHARLGNLEFIEEKPLLGEALSRVKRAEKKWRDKREKLQLETKRVYTEAKEAVDALFVDSQYDRLQADTNIGMIHAADKLVHRTREAYLSELSVIPGVNAEIFEELEGRIITAISLYDARNVVKNGDFNNGLAFWNVKGHVDVQQSHHRSVLVIPEWEAEVSQEVRVCPGRGYILRVTAYKEGYGEGCVTIHEIENNTDELKFKNCEEEEVYPTDTGTCNDYTAHQGTAACNSRNAGYEDAYEVDTTASVNYKPTYEEETYTDVRRDNHCEYDRGYVNYPPLPAGYVTKELEYFPETDKVWIEIGETEGKFIVGSVELLLMEE

SEQ ID NO: 149 - protein, 1228 aa, Bacillus thuringiensis
MTSNRKNENEIINALSIPAVSNHSTQMDLSPDARIEDSLCIAEGNNINPLVSASTVQTGINIAGRILGVLGVPFAGQIASFYSFLVGELWPRGRDQWEIFLEHVEQLINQQITENARNTALARLQGLGDSFRAYQQSLEDWLENRDDARTRSVLYTQYIALELDFLNAMPLFAIRNQEVPLLMVYAQAANLHLLLLRDASLFGSEFGLTSQEIQRYYERQVEQTRDYSDYCVEWYNTGLNSLRGTNAASWVRYNQFRRDLTLGVLDLVALFPSYDTRTYPINTSAQLTREVYTDAIGATGVNMASMNWYNNNAPSFSAIETAVIRSPHLLDFLEQLTIFSTSSRWSATRHMTYWRGHTIQSRPIGGGLNTSTHGSTNTSINPVRLSFFSRDVYWTESYAGVLLWGIYLEPIHGVPTVRFNFRNPQNTFERGTANYSQPYESPGLQLKDSETELPPETTERPNYESYSHRLSHIGLISQSRVHVPVYSWTHRSADRTNTISSDSITQIPLVKSFNLNSGTSVVSGPGFTGGDIIRTNVNGSVLSMGLNFNNTSLQRYRVRVRYAASQTMVLRVTVGGSTTFDQGFPSTMSANESLTSQSFRFAEFPVGISASGSQTAGISISNNAGRQTFHFDKIEFIPITATFEAEYDLERAQEAVNALFTNTNPRRLKTDVTDYHIDQVSNLVACLSDEFCLDEKRELLEKVKYAKRLSDERNLLQDPNFTSINKQPDFISTNEQSNFTSIHEQSEHGWWGSENITIQEGNDVFKENYVTLPGTFNECYPTYLYQKIGESELKAYTRYQLRGYIEDSQDLEIYLIRYNAKHETLDVPGTESVWPLSVESPIGRCGEPNRCAPHFEWNPDLDCSCRDGEKCAHHSHHFSLDIDIGCTDLHENLGVWVVFKIKTQEGHARLGNLEFIEEKPLLGEALSRVKRAEKKWRDKREKLQLETKRVYTEAKEAVDALFVDSQYNRLQADTNIGMIHAADKLVHRIREAYLSELSVIPGVNAEIFEELEGRIITAISLYDARNVVKNGDFNNGLACWNVKGHVDVQQSHHRSVLVIPEWEAEVSQAVRVCPGRGYILRVTAYKEGYGEGCVTIHEIENNTDELKFKNCEEEEVYPTDTGTCNDYTAHQGTAVCNSRNAGYEDAYEVDTTASVNYKPTYEEETYTDVRRDNHCEYDRGYVNYPPLPAGYMTKELEYFPETDKVWIEIGETEGKFIVDSVELLLMEE

SEQ ID NO: 150 - protein, 1228 aa, Bacillus thuringiensis
MTSNRKNENEIINALSIPAVSNHSTQMDLSPDARIEDSLCIAEGNNINPLVSASTVQTGINIAGRILGVLGVPFAGQIASFYSFLVGELWPRGRDQWEIFLEHVEQLINQQITENARNTALARLQGLGDSFRAYQQSLEDWLENRDDARTRSVLYTQYIALELDFLNAMPLFAIRNQEVPLLMVYAQAANLHLLLLRDASLFGSEFGLTSQEIQRYYERQVEQTRDYSDYCVEWYNTGLNSLRGTNAASWVRYNQFRRDLTLGVLDLVALFPSYDTRTYPINTSAQLTREVYTDAIGATGVNMASMNWYNNNAPSFSAIETAVIRSPHLLDFLEQLTIFSTSSRWSATRHMTYWRGHTIQSRPIGGGLNTSTHGSTNTSINPVRLSFFSRDVYWTESYAGVLLWGIYLEPIHGVPTVRFNFRNPQNTFERGTANYSQPYESPGLQLKDSETELPPETTERPNYESYSHRLSHIGLISQSRVHVPVYSWTHRSADRTNTISSDSITQIPLVKSFNLNSGTSVVSGPGFTGGDIIRTNVNGSVLSMGLNFNNTSLQRYRVRVRYAASQTMVLRVTVGGSTTFDQGFPSTMSANESLTSQSFRFAEFPVGISASGSQTAGISISNNAGRQTFHFDKIEFIPITATFEAEYDLERAQEAVNALFTNTNPRRLKTDVTDYHIDQVSNLVACLSDEFCLDEKRELLEKVKYAKRLSDERNLLQDPNFTSINKQPDFISTNEQSNFTSIHEQSEHGWWGSENITIQEGNDVFKENYVTLPGTFNECYPTYLYQKIGESELKAYTRYQLRGYIEDSQDLEIYLIRYNAKHETLDVPGTESVWPLSVESPIGRCGEPNRCAPHFEWNPDLDCSCRDGEKCAHHSHHFSLDIDIGCTDLHENLGVWVVFKIKTQEGHARLGNLEFIEEKPLLGEALSRVKRAEKKWRDKREKLQLETKRVYTEAKEAVDALFVDSQYNRLQADTNIGMIHAADKLVHRIREAYLSELSVIPGVNAEIFEELEGRIITAISLYDARNVVKNGDFNNGLACWNVKGHVDVQQSHHRSVLVIPEWEAEVSQAVRVCPGRGYILRVTAYKEGYGEGCVTIHEIENNTDELKFKNCEEEEVYPTDTGTCNDYTAHQGTAACNSRNAGYEDAYEVDTTASVNYKPTYEEETYTDVRRDNHCEYDRGYVNYPPLPAGYVTKELEYFPETDKVWIEIGETEGTFIVDSIELLLMEE

SEQ ID NO: 151 - protein, 1235 aa, Bacillus thuringiensis
MNSNRKNENEIIDASFIPAVSNESVTISKEYAQTNQLQNNSIEDGLCIAEGEYIDPFVSASTVQTGISIAGRILGVLGVPFAGQLASFYSFIVGELWPKGRDQWEIFMEHVEQLVRQQITANARNTALARLQGLGDSFRAYQQSLEDWLENRNDARTRSVLYTQYIALELDFLNAMPLFAIREQEVPLLMVYAQAANLHLLLLRDASLYGREFGLTSQEIQRYYERQVERTRDYSDHCVQWYNTGLNNLRGTNAESWVRYNQFRRDLTLGVLDLVALFPSYDTRTYPINTSAQLTREVYTDAIGATGVNMASMNWYNNNAPSFSAIETAVIRSPHLLDFLEQLKIFSASSRWSNTRHMTYWRGHTIQSRPIRGALITSTHGNTNTSINPVTFQFPSRDVYRTESYAGVLLWGIYLEPIHGVPTVRFNFRNPQNTFERGTANYSQPYESPGLQLKDSETELPPETTERPNYESYSHRLSHIGIILQTRLNVPVYSWTHRSADRTNTISSDSITQIPLVKSFNLNSGTSVVSGPGFTGGDIIRTNVNGSVLSMGLNFNNTSLQRYRVRVRYAASQTMVLRVTVGGSTTFDQGFPSTMSANESLTSQSFRFAEFPVGISASGSQTAGISISNNAGRQTFHFDKIEFIPITATFEAEYDLERAQEAVNALFTNTNPRRLKTGVTDYHIDEVSNLVACLSDEFCLDEKRELLEKVKYAKRLSDERNLLQDPNFTSINKQPDFISTNEQSNFTSIHEQSEHGWWGSENITIQEGNDVFKENYVTLPGTYNECYPTYLYQKIGESELKAYTRYQLRGYIEDSQDLEIYLIRYNAKHETLDVPGTESVWPLSVESPIRRCGEPNRCAPHFEWNPDLDCSCRDGEKCAHHSHHFSLDIDVGCIDLHENLGVWVVFKIKTQEGHARLGNLEFIEEKPLLGEALSRVKRAEKKWRDKREKLQLETKRVYTEAKEAVDALFVDSQYDRLQADTNIGMIHAADKLVHRIREAYLSELSVIPGVNAEIFEELEGRIITAISLYDARNVVKNGDFNNGLACWNVKGHVDVQQSHHRSVLVIPEWEAEVSQAVRVCPGRGYILRVTAYKEGYGEGCVTIHEIENNTDELKFKNCEEEEVYPTDTGTCNDYTAHQGTAACNSRNAGYEDAYEVDTTASVNYKPTYEEETYTDVRRDNHCEYDRGYVNYPPLPAGYVTKELEYFPETDKVWIEIGETEGTFIVDSIELLLMEE

SEQ ID NO: 152 - protein, 1256 aa, Bacillus thuringiensis PS46L
MTSNRKNENEIINALSIPTVSNPSTQMNLSPDARIEDSLCVAEVNNIDPFVSASTVQTGINIAGRILGVLGVPFAGQLASFYSFLVGELWPSGRDPWEIFLEHVEQLIRQQVTENTRNTAIARLEGLGRGYRSYQQALETWLDNRNDARSRSIILERYVALELDITTAIPLFRIRNQEVPLLMVYAQAANLHLLLLRDASLFGSEWGTASSDVNQYYQEQIRYTEEYSNHCVQWYNTGLNNLRGTNAESWVRYNQFRRDLTLGVLDLVALFPSYDTRTYPINTSAQLTREVYTDAIGTVHPSQAFASTTWFNNNAPSFSAIEAAVIRPPHLLDFPEQLTIYSTLSRWSNTQFMNIWAGHRLESRPIAGSLNTSTQGSTNTSINPVTLQFTSRDIYRTESLAGLNIFITQPVNGVPWVRFNWRNPLNSLRGSLLYTIGYTGVGTQLQDSETELPPETTERPNYESYSHRLSHIGLISSSHVRALVYSWTHRSADRTNTIGPNRITQIPAVKGRFLFNGSVISGPGFTGGDVVRLNRNNGNIQNRGYIEVPIQFTSTSTRYRVRVRYASVTSIELNVNWGNSSIFTNTLPATAASLDNLQSGDFGYVEINNAFTSATGNIVGVRNFSANAEVIIDRFEFIPVTATFEAKYDLERAQKAVNALFTSTNPRRLKTDVTDYHIDQVSNLVVCLSDEFCLDEKRELFEKVKYAKRLSDERNLLQDPNFTFINGQPSFASIDGQSNFTSINELSNHGWWGSANVTIQEGNDVFKENYVTLPGTFNECYPNYLYQKIGESELKAYTRYQLRGYIEDSQDLEIYLIRYNAKHETLNVPGTESLWPLSVESPIGRCGEPNRCAPHFGWNPDLDCSCRDREKCAHHSHHFTLDIDVGCTDLQEDLGVWVVFKIKTQEGYARLGNLEFIEEKPLIGEALSRVKRAEKKWRDKREKLQVETKRVYIDAKEAVDALFVDSQYDRLQADTNIGMIHAADRLVHRIHEAYLPELPFIPGINVVIFEELENRISTAFSLYDARNVIKNGDFNNGLTCWNVKGHVEVQQLNNHRSVLVIPEWEAEVSQKVRVCPGRGYILRVTAYKEGYGEGCVTIHEVDNNTDQLKFSNCEKGQVYPGNTIACNDYNKNHGANACSSRNRGYDEFYGNTPADYSANQKEYGGAYTSHNHAYGESYESNSSIPADYAPVYEEEAYTHGRRGNSCEYNRGYTPLPAGYVTAELEYFPETDTVWVEIGETEGTFIVDNVELLLMEE

SEQ ID NO: 153 - protein, 1189 aa, Bacillus thuringiensis entomocidus 60.5
MEENNQNQCIPYNCLSNPEEVLLDGERISTGNSSIDISLSLVQFLVSNFVPGGGFLVGLIDFVWGIVGPSQWDAFLVQIEQLINERIAEFARNAAIANLEGLGNNFNIYVEAFKEWEEDPNNPETRTRVIDRFRILDGLLERDIPSFRISGFEVPLLSVYAQAANLHLAILRDSVIFGERWGLTTINVNENYNRLIRHIDEYADHCANTYNRGLNNLPKSTYQDWITYNRLRRDLTLTVLDIAAFFPNYDNRRYPIQPVGQLTREVYTDPLINFNPQLQSVAQLPTFNVMESSRIRNPHLFDILNNLTIFTDWFSVGRNFYWGGHRVISSLIGGGNITSPIYGREANQEPPRSFTFNGPVFRTLSNPTLRLLQQPWPAPPFNLRGVEGVEFSTPTNSFTYRGRGTVDSLTELPPEDNSVPPREGYSHRLCHATFVQRSGTPFLTTGVVFSWTDRSATLTNTIDPERINQIPLVKGFRVWGGTSVITGPGFTGGDILRRNTFGDFVSLQVNINSPITQRYRLRFRYASSRDARVIVLTGAASTGVGGQVSVNMPLQKTMEIGENLTSRTFRYTDFSNPFSFRANPDIIGISEQPLFGAGSISSGELYIDKIEIILADATFEAESDLERAQKAVNALFTSSNQIGLKTDVTDYHIDQVSNLVDCLSDEFCLDEKRELSEKVKHAKRLSDERNLLQDPNFRGINRQPDRGWRGSTDITIQGGDDVFKENYVTLPGTVDECYPTYLYQKIDESKLKAYTRYELRGYIEDSQDLEIYLIRYNAKHEIVNVPGTGSLWPLSAQSPIGKCGEPNRCAPHLEWNPDLDCSCRDGEKCAHHSHHFTLDIDVGCTDLNEDLGVWVIFKIKTQDGHARLGNLEFLEEKPLLGEALARVKRAEKKWRDKREKLQLETNIVYKEAKESVDALFVNSQYDRLQVDTNIAMIHAADKRVHRIREAYLPELSVIPGVNAAIFEELEGRIFTAYSLYDARNVIKNGDFNNGLLCWNVKGHVDVEEQNNHRSVLVIPEWEAEVSQEVRVCPGRGYILRVTAYKEGYGEGCVTIHEIEDNTDELKFSNCVEEEVYPNNTVTCNNYTGTQEEYEGTYTSRNQGYDEAYGNNPSVPADYASVYEEKSYTDGRRENPCESNRGYGDYTPLPAGYVTKDLEYFPETDKVWIEIGETEGTFIVDSVELLLMEE

SEQ ID NO: 154 - protein, 181 aa, Bacillus thuringiensis E05-20a
LTVLDIAAFFPNYDNRRYPIQPVGQLTREVYTDPLINFNPQLQSVAQLPTFNVMESSAIRNPHLFDILNNLTIFTDWFSVGRNFYWGGHRVISSLIGGGNITSPIYGREANQEPPRSFTFNGPVFRTLSNPTLRLLQQPWPAPPFNLRGVEGVEFSTPTNSFTYRGRGTVDSLTELPPEDN

SEQ ID NO: 155 - protein, 1044 aa, Bacillus thuringiensis C-33
MEENNQNQCIPYNCLSNPEEVLLDGERISTGNSSIDISLSLVQFLVSNFVPGGGFLVGLIDFVWGIVGPSQWDAFLVQIEQLINERIAEFARNAAIANLEGLGNNFNIYVEAFKEWEEDPNNPATRTRVIDRFRILDGLLERDIPSFRISGFEVPLLSVYAQAANLHLAILRDSVIFGERWGLTTINVNENYNRLIRHIDEYADHCANTYNRGLNNLPKSTYQDWITYNRLRRDLTLTVLDIAAFFPNYDNRRYPIQPVGQLTREVYTDPLINFNPQLQSVAQLPTFNVMESSAIRNPHLFDILNNLTIFTDWFSVGRNFYWGGHRVISSLIGGGNITSPIYGREANQEPPRSFTFNGPVFRTLSNPTLRLLQQPWPAPPFNLRGVEGVEFSTPTNSFTYRGRGTVDSLTELPPEDNSVPPREGYSHRLCHATFVQRSGTPFLTTGVVFSWTHRSATLTNTIDPERINQIPLVKGFRVWGGTSVITGPGFTGGDILRRNTFGDFVSLQVNINSPITQRYRLRFRYASSRDARVIVLTGAASTGVGGQVSVNMPLQKTMEIGENLTSRTFRYTDFSNPFSFRANPDIIGISEQPLFGAGSISSGELYIDKIEIILADATFEAESDLERAQKAVNALFTSSNQIGLKTDVTDYHIDQVSNLVDCLSDEFCLDEKRELSEKVKHAQRLSDERNLLQDPNFRGINRQPDRGWRGSTDITIQGGDDVFKENYVTLPGTVDECYPTYLYQKIDESKLKAYTRYELRGYIEDSQDLEIYLIRYNAKHEIVNVPGTGSLWPLSAQSPIGKCGEPNRCAPHLEWNPDLDCSCRDGEKCAHHSHHFTLDIDVGCTDLNEDLGVWVIFKIKTQDGHARLGNLEFLEEKPLLGEALARVKRAEKKWRDKREKLQLETNIVYKEAKESVDALFVNSQYDRLQVDTNIAMIHAADKRVHRIREAYLPELSVIPGVNAAIFEELEGRIFTAYSLYDARNVIKNGDFNNGLLCWNVKGHVDVEEQNNHRSVLVIPEWEAEVSQEVRVCPGRGYILRVTAY

SEQ ID NO: 156 - protein, 1191 aa, Bacillus thuringiensis LB-R-78
MENNIQNQCIPYNCLSNPEEVLLDGERISTGNSSIDISLSLVQFLVSNFVPGGGFLVGLIDFVWGIVGPSQWDAFLVQIEQLINERIAEFARNAAIANLEGLGNNFNIYVEAFKEWEEDPNNPATRTRVIDRFRILDGLLERDIPSFRISGFEVPLLSVYAQAANLHLAILRDSVIFGERWGLTTINVNENYNRLIRHIDEYADHCANTYNRGLNNLPKSTYQDWITYNRLRRDLTLTVLDIAAFFPNYDNRRYPIQPVGQLTREVYTDPLINFNPQLQSVAQLPTFNVMESSAIRNPHLFDILNNLTIFTDWFSVGRNFYWGGHRVISSLIGGGNITSPIYGREANQEPPRSFTFNGPVFRTLSNPTLRLLQQPWPAPPFNLRGVEGVEFSTPTNSFTYRGRGTVDSLTELPPEDNSVPPREGYSHRLCHATFVQRSGTPFLTTGVVFSWTHRSATLTNTIDPERINQIPLVKGFRVWGGTSVITGPGFTGGDILRRNTFGDFVSLQVNINSPITQRYRLRFRYASSRDARVIVLTGAASTGVGGQVSVNMPLQKTMEIGENLTSRTFRYTDFSNPFSFRANPDIIGISEQPLFGAGSISSGELYIDKIEIILADATFEAESDLERAQKVDAVNALFTSSNQIGLKTDVTDYHIDQVSNLVDCLSDEFCLDEKRELSEKVKHAKRLSDERNLLQDPNFRGINRQPDRGWRGSTDITIQGGDDVFKENYVTLPGTVDECYPTYLYQKIDESKLKAYTRYELRGYIEDSQDLEIYLIRYNAKHEIVNVPGTGSLWPLSAQSPIGKCGEPNRCAPHLEWNPDLDCSCRDGEKCAHHSHHFTLDIDVGCTDLNEDLGVWVIFKIKTQDGHARLGNLEFLEEKPLLGGALARVKRAEKKWRDKREKLQLETNIVYKEAKESVDALFVNSQYDRLQVDTNIAMIHAADKRVHRIREAYLPELSVIPGVNAAIFEELEGRIFTAYSLYDARNVIKNGDFNNGLLCWNVKGHVDVEEQNNHRSVLVIPEWEAEVSQEVRVCPGRGYILRVTAYKEGYGEGCVTIHEIEDNTDELKFSNCVEEEVYPNNTVTCNNYTGTQEEYEGTYTSRNQGYDEAYGNNPSVPADYASVYEEKSYTDGRRENPCESNRGYGDYTPLPAGYVTKDLEYFPETDKVWIEIGETEGTFIVDSVELLLMEE

SEQ ID NO: 157 - protein, 823 aa, Bacillus thuringiensis aizawai 7.29
MEENNQNQCIPYNCLSNPEEVLLDGERISTGNSSIDISLSLVQFLVSNFVPGGGFLVGLIDFVWGIVGPSQWDAFLVQIEQLINERIAEFARNAAIANLEGLGNNFNIYVEAFKEWEEDPNNPATRTRVIDRFRILDGLLERDIPSFRISGFEVPLLSVYAQAANLHLAILRDSVIFGERWGLTTINVNENYNRLIRHIDEYADHCANTYNRGLNNLPKSTYQDWITYNRLRRDLTLTVLDIAAFFPNYDNRRYPIQPVGQLTREVYTDPLINFNPQLQSVAQLPTFNVMESSAIRNPHLFDILNNLTIFTDWFSVGRNFYWGGHRVISSLIGGGNITSPIYGREANQEPPRSFTFNGPVFRTLSIPTLRLLQQPCQRHHFNLRGGEGVEFSTPTNSFTYRGRGTVDSLTELPPEDNSVPPREGYSHRLCHATFVQRSGTPFLTTGVVFSWTHRSATLTNTIDPERINQIPLVKGFRVWGGTSVITGPGFTGGDILRRNTFGDFVSLQVNINSPITQRYRLRFRYASSRDARVIVLTGAASTGVGGQVSVNMPLQKTMEIGENLTSRTFRYTDFSNPFSFRANPDIIGISEQPLFGAGSISSGELYIDKIEIILADATFEAESDLERAQKAVNALFTSSNQIGLKTDVTDYHIDQVSNLVDCLSDEFCLDEKRELSEKVKHAKRLSDERNLLQDPNFRGINRQPDRGWRGSTDITIQGGDDVFKENYVTLPGTVDECYPTYLYQKIDESKLKAYTRYELRGYIEDSQDLEIYLIAYNAKHEIVNVPGTGSLWPLSAQSPIGKCGEPNRCAPHLEWNPDLDCSC

SEQ ID NO: 158 - protein, 1189 aa, Bacillus thuringiensis aizawai PS81I
MEENNQNQCIPYNCLSNPEEVLLDGERISTGNSSIDISLSLVQFLVSNFVPGGGFLVGLIDFVWGIVGPSQWDAFLVQIEQLINERIAEFARNAAIANLEGLGNNFNIYVEAFKEWEEDPNNPATRTRVIDRFRILDGLLERDIPSFRISGFEVPLLSVYAQAANLHLAILRDSVIFGERWGLTTINVNENYNRLIRHIDEYADHCANTYNRGLNNLPKSTYQDWITYNRLRRDLTLTVLDIAAFFPNYDNRRYPIQPVGQLTREVYTDPLINFNPQLQSVAQLPTFNVMESSAIRNPHLFDILNNLTIFTDWFSVGRNFYWGGHRVISSLIGGGNITSPIYGREANQEPPRSFTFNGPVFRTLSNPTLRLLQQPWPAPPFNLRGVEGVEFSTPTNSFTYRGRGQVDSLTELPPEDNSVPPREGYSHRLCHATFVQRSGTPFLTTGVVFSWTHRSATLTNTIDPERINQIPLVKGFRVWGGTSVITGPGFTGGDILRRNTFGDFVSLQVNINSPITQRYRLRFRYASSRDARVIVLTGAASTGVGGQVSVNMPLQKTMEIGENLTSRTFRYTDFSNPFSFRANPDIIGISEQPLFGAGSISSGELYIDKIEIILADATFEAESDLERAQKAVNALFTSSNQIGLKTDVTDYHIDQVSNLVDCLSDEFCLDEKRELSEKVKHAKRLSDERNLLQDPNFRGINRQPDRGWRGSTDITIQGGDDVFKENYVTLPGTVDECYPTYLYQKIDESKLKAYTRYELRGYIEDSQDLEIYLIRYNAKHEIVNVPGTGSLWPLSAQSPIGKCGEPNRCAPHLEWNPDLDCSCRDGEKCAHHSHHFTLDIDVGCTDLNEDLGLWVIFKIKTQDNHARLGNLEFLEEKPLLGEALARVKRAEKKWRDKREKLQLETNIVYKEAKESVDALFVNSQYDRLQVNTNIAMIHAADKRVHRIREAYLPELSVIPGVNAAIFEELEGRIFTAYSLYDARNVIKNGDFNNGLLCWNVKGHVDVEEQNNHRSVLVIPEWEAEVSQEVRVCPGRGYILRVTAYKEGYGEGCVTIHEIEDNTDELKFSNCVEEEVYPNNTVTCNNYTGTQEEYEGTYTSRNQGYDEAYGNNPSVPADYASVYEEKSYTDGRRENPCESNRGYGDYTPLPAGYVTKDLEYFPETDKVWIEIGETEGTFIVDSVELLLMEE

SEQ ID NO: 159 - protein, 1189 aa, Bacillus thuringiensis entomocidus HD110
MEENNQNQCIPYNCLSNPEEVLLDGERISTGNSSIDISLSLVQFLVSNFVPGGGFLVGLIDFVWGIVGPSQWDAFLVQIEQLINERIAEFARNAAIANLEGLGNNFNIYVEAFKEWEEDPNNPETRTRVIDRFRILDGLLERDIPSFRISGFEVPLLSVYAQAANLHLAILRDSVIFGERWGLTTINVNENYNRLIRHIDEYADHCANTYNRGLNNLPKSTYQDWITYNRLRRDLTLTVLDIAAFFPNYDNRRYPIQPVGQLTREVYTDPLINFNPQLQSVAQLPTFNVMESSAIRNPHLFDILNNLTIFTDWFSVGRNFYWGGHRVISSLIGGGNITSPIYGREANQEPPRSFTFNGPVFRTLSNPTLRLLQQPWPAPPFNLRGVEGVEFSTPTNSFTYRGRGTVDSLTELPPEDNSVPPREGYSHRLCHATFVQRSGTPFLTTGVVFSWTHRSATLTNTIDPERINQIPLVKGFRVWGGTSVITGPGFTGGDILRRNTFGDFVSLQVNINSPITQRYRLRFRYASSRDARVIVLTGAASTGVGGQVSVNMPLQKTMEIGENLTSRTFRYTDFSNPFSFRANPDIIGISEQPLFGAGSISSGELYIDKIEIILADATFEAESDLERAQKAVNALFTSSNQIGLKTDVTDYHIDQVSNLVDCLSDEFCLDEKRELSEKVKHAKRLSDERNLLQDPNFRGINRQPDRGWRGSTDITIQGGDDVFKENYVTLPGTVDECYPTYLYQKIDESKLKAYTRYELRGYIEDSQDLEIYLIRYNAKHEIVNVPGTGSLWPLSAQSPIGKCGEPNRCAPHLEWNPDLDCSCRDGEKCAHHSHHFTLDIDVGCTDLNEDLGVWVIFKIKTQDGHARLGNLEFLEEKPLLGEALARVKRAEKKWRDKREKLQLETNIVYKEAKESVDALFVNSQYDRLQVDTNIAMIHAADKRVHRIREAYLPELSVIPGVNAAIFEELEGRIFTAYSLYDARNVIKNGDFNNGLLCWNVKGHVDVEEQNNHRSVLVIPEWEAEVSQEVRVCPGRGYILRVTAYKEGYGEGCVTIHEIEDNTDELKFSNCVEEEVYPNNTVTCNNYTGTQEEYEGTYTSRNQGYDEAYGNNPSVPADYASVYEEKSYTDGRRENPCESNRGYGDYTPLPAGYVTKDLEYFPETDKVWIEIGETEGTFIVDSVELLLMEE

SEQ ID NO: 160 - protein, 756 aa, Bacillus thuringiensis aizawai 7.29
MEENNQNQCIPYNCLSNPEEVLLDGERISTGNSSIDISLSLVQFLVSNFVPGGGFLVGLIDFVWGIVGPSQWDAFLVQIEQLINERIAEFARNAAIANLEGLGNNFNIYVEAFKEWEEDPNNPATRTRVIDRFRILDGLLERDIPSFRISGFEVPLLSVYAQAANLHLAILRDSVIFGERWGLTTINVNENYNRLIRHIDEYADHCANTYNRGLNNLPKSTYQDWITYNRLRRDLTLTVLDIAAFFPNYDNRRYPIQPVGQLTREVYTDPLINFNPQLQSVAQLPTFNVMESSAIRNPHLFDILNNLTIFTDWFSVGRNFYWGGHRVISSLIGGGNITSPIYGREANQEPPRSFTFNGPVFRTLSNPTLRLLQQPWPAPPFNLRGVEGVEFSTPTNSFTYRGRGTVDSLTELPPEDNSVPPREGYSHRLCHATFVQRSGTPFLTTGVVFSWTHRSATLTNTIDPERINQIPLVKGFRVWGGTSVITGPGFTGGDILRRNTFGDFVSLQVNINSPITQRYRLRFRYASSRDARVIVLTGAASTGVGGQVSVNMPLQKTMEIGENLTSRTFRYTDFSNPFSFRANPDIIGISEQPLFGAGSISSGELYIDKIEIILADATFEAESDLERAQKAVNALFTSSNQIGLKTDVTDYHIDQVSNLVDCLSDEFCLDEKRELSEKVKHAKRLSDERNLLQDPNFRGINRQPDRGWRGSTDITIQGGDDVFKENYVTLPGTVDECYPTYLYQKIDESKLKAYTR

SEQ ID NO: 161 - protein, 1189 aa, Bacillus thuringiensis AF-2
MEENNQNQCIPYNCLSNPEEVLLDGERISTGNSSIDISLSLVQFLVSNFVPGGGFLVGLIDFVWGIVGPSQWDAFLVQIEQLINERIAEFARNAAIANLEGLGNNFNIYVEAFKEWEEDPNNPATRTRVIDRFRILDGLLERDIPSFRISGFEVPLLSVYAQAANLHLAILRDSVIFGERWGVTTINVNENYNRLIRHIDEYADHCANTYNRGLNNLPKSTYQDWITYNRLRRDLTLTVLDIAAFFPNYDNRRYPIQPVGQLTREVYTDPLINFNPQLQSVAQLPTFNVMESSAIRNPHLFDILNNLTIFTDWFSVGRNFYWGGHRVISSLIGGGNITSPIYGREANQEPPRSFTFNGPVFRTLSNPTLRLLQQPWPAPPFNLRGVEGVEFSTPTNSFTYRGRGTVDSLTELPPEDNSVPPREGYSHRLCHATFVQRSGTPFLTTGVVFSWTHRSATLTNTIDPERINQIPLVKGFRVWGGTSVITGPGFTGGDILRRNTFGDFVSLQVNINSPITQRYRLRFRYASSRDARVIVLTGAASTGVGGQVSVNMPLQKTMEIGENLTSRTFRYTDFSNPFSFRANPDIIGISERPLFGAGSISSGELYIDKIEIILADATFEAESDLERAQKAVNALFTSSNQIGLKTDVTDYHIDQVSNLVDCLSDEFCLDEKRELSEKVKHAKRLSDERNLLQDPNFRGINRQPDRGWRGSTDITIQGGDDVFKENYVTLPGTVDECYPTYLYQKIDESKLKAYTRYELRGYIEDSQDLEIYLIRYNAKHEIVNVPGTGSLWPLSAQSPIGKCGEPNRCAPHLEWNPDLDCSCRDGEKCAHHSHHFTLDIDVGCTDLNEDLGVWVIFKIKTQDGHARLGNLEFLEEKPLLGEALARVKRAEKKWRDKREKLQLETNIVYKEAKESVDALFVNSQYDRLQVDTNIAMIHAADKRVHRIREAYLPELSVIPGVNAAIFEELEGRIFTAYSLYDARNVIKNGDFNNGLLCWNVKGHVDVEEQNNHRSVLVIPEWEAEVSQEVRVCPGRGYILRVTAYKEGYGEGCVTIHEIEDNTDELKFSNCVEEEVYPNNTVTCNNYTGTQEEYEGTYSSRNQGYDEAFGNNPSVPADYASVYEEKSYTDGRRENPCESNRGYGDYTPLPAGYVTKDLEYFPETDKVWIEIGETEGTFIVDSVELVLMEE

SEQ ID NO: 162 - protein, 1189 aa, Bacillus thuringiensis J8
MEENNQNQCIPYNCLSNPEEVLLDGERISTGNSSIDISLSLVQFLVSNFVPGGGFLVGLIDFVWGIVGPSQWDAFLVQIEQLINERIAEFARNAAIANLEGLGNNFNIYVEAFKEWEEDPNNPATRTRVIDRFRILDGLLERDIPSFRISGFEVPLLSVYAQAANLHLAILRDSVIFGERWGLTTINVNENYNRLIRHIDEYADHCANTYNRGLNNLPKSTYQDWITYNRLRRDLTLTVLDIAAFFPNYDNRRYPIQPVGQLTREVYTDPLINFNPQLQSVAQLPTFNVMESSAIRNPHLFDILNNLTIFTDWFSVGRNFYWGGHRVISSLIGGGNITSPIYGREANQEPPRSFTFNGPVFRTLSNPTLRLLQQPWPAPPFNLRGVEGVEFSTPTNSFTYRGRGTVDSLTELPPEDNSVPPREGYSHRLCHATFVQRSGTPFLTTGVVFSWTHRSATLTNTIDPERINQIPLVKGFRVWGGTSVITGPGFTGGDILRRNTFGDFVSLQVNINSPITQRYRLRFRYASSRDARVIVLTGAASTGVGGQVSVNMPLQKTMEIGENLTSRTFRYTDFSNPFSFRANPDIIGISEQPLFGAGSISSGELYIDKIEIILADATFEAESDLERAQKAVNALFTSSNQIGLKTDVTDYHIDQVSNLVDCLSDEFCLDEKRELSEKVKHAKRLSDERNLLQDPNFRGINRQPDRGWRGSTDITIQGGDDVFKENYVTLPGTVDECYPTYLYQKIDESKLKAYTRYELRGYIEDSQDLEIYLIRYNAKHEIVNVPGTGSLWPLSAQSPIGKCGEPNRCAPHLEWNPDLDCSCRDGEKCAHHSHHFTLDIDVGCTDLNEDLGVWVIFKIKTQDGHARLGNLEFLEEKPLLGEALARVKRAEKKWRDKREKLQLETNIVYKEAKESVDALFVNSQYDRLQVDTNIAMIHAADKRVHRIREAYLPELSVIPGVNAAIFEELEGRIFTAYSLYDARNVIKNGDFNNGLLCWNVKGHVDVEEQNNHRSVLVIPEWEAEVSQEVRVCPGRGYILRVTAYKEGYGEGCVTIHEIEDNTDELKFSNCVEEEVYPNNTVTCNNYTGTQEEYEGTYTSRNQGYDEAYGNNPSVPADYASVYEEKSYTDGRRENPCESNRGYGDYTPLPAGYVTKDLEYFPETDKVWIEIGETEGTFIVDSVELLLMEE

SEQ ID NO: 163 - protein, 1189 aa, Bacillus thuringiensis c002; identical to SEQ ID NO: 162

SEQ ID NO: 164 - protein, 1189 aa, Bacillus thuringiensis G10-01A; identical to SEQ ID NO: 162

SEQ ID NO: 165 - protein, 1176 aa, Bacillus thuringiensis c001
MENNIQNQCVPYNCLSNPEEILLDGERISTGNSSIDISLSLVQLLVSNFVPGGGFLVGLLDFVWGIVGPSPWDAFLVQIEQLINERIAAYARSAAISNLEGLGNNFNIYVEAFKEWEADPDNPVTRTRVVDRFRILDGLLERDIPSFRIAGFEVPLLSVYAQAANLHLAILRDSSIFGARWGLTTINVNENYNRLIRHIDEYANHCADTYNRGLNNLPKSTYQDWITYNRLRRDLTLTVLDIAAFFPSYDNRRYPIQSVGQLTREIYTDPLITFNPQLQSVAQLPTFNVMESNAIRTPHLFDVLNNLTIFTDWFSVGRNFYWGGHRVISNRIGGGNITSPIYGREANQEPPRSFTFNGPVFRTLSNPTFRPLQQPWPAPPFNLRGVEGVEFSTPLNSFTYRGRGTVDSLTELPPEDNSVPPREGYSHRLCHATFVQRSGTPFLTTGPVFSWTHRSATDRNIIYPDVINQIPLVKAFNLTSGTSVVRGPGFTGGDIIRTNVNGSVLSMSLNFSNTTLQRYRVRVRYAASQTMVMSVTVGGSTTGNQGFPSTMSANGALTSQSFRFAEFPVGISASGSQGASISISNNVGRQMFHLDRIEFLPVTSTFEEEYDLERAQEAVNALFTSTNQLGLKTDVTDYHIDQVSNLVECLSDEFCLDEKRELSEKVKHAKRLSDERNLLQDRNFRSINGQLDRGWRGSTDITIQGGDDVFKENYVTLPGTFDECYPTYLYQKIDESKLKSYTRYELRGYIEDSQDLEIYLIRYNAKHEIVNVPGTGSLWPLSIENSIGPCGEPNRCAPHLEWNPNLDCSCRDGEKCAHHSHHFSLDIDVGCTDLNEDLGVWVIFKIKTQDGHARLGNLEFLEEKPLLGEALARVKRAEKKWRDKREKLEWETNIVYKEAKESVDALFVNSQYDRLQADTNIAMIHAADKRVHRIREAYLPELSVIPGVNAGIFEELEGRIFTAYSLYDARNVIKNGDFNNGLLCWNLKGHVDVEEQNNHRSVLVVPEWEAEVSQEVRVCPGRGYILRVTAYKEGYGEGCVTIHEIEDNTDELKFSNCVEEEVYPNNTVTCNDYTATQEEYGGAYTSRNHGYGKSYESNSSVQADYASVYEEKADTDGRRDNHCESNRGYGDYTPLPAGYVTKELEYFPETDKVWVEIGETEGTFIVDSVELLLMEE

SEQ ID NO: 166 - protein, 646 aa, Bacillus thuringiensis 087
MVMSVTVGGSTTGNQGFPSTMSANGALTSQSFRFAEFPVGISASGSQGASISISNNVGRQMFHLDRIEFLPVTSTFEEEYDLERAQEAVNALFTSTNQLGLKTDVTDYHIDQVSNLVECLSDEFCLDEKRELSEKVKHAKRLSDERNLLQDRNFRSINGQLGRGWRGSTDITIQGGDDVFKENYVTLPGTFDECYPTYLYQKIDESKLKSYTRYELRGYIEDSQDLEIYLIRYNAKHEIVNVPGTGSLWPLSIENSIGPCGEPNRCAPHLEWNPNLDCSCRDGEKCAHHSHHFSLDIDVGCTDLNEDLGVWVIFKIKTQDGHARLGNLEFLEEKPLLGEALARVKRAEKKWRDKREKLEWETNIVYKEAKESVDALFVNSQYDRLQADTNIAMIHAADKRVHRIREAYLPELSVIPGVNAGIFEELEGRIFTAYSLYDARNVIKNGDFNNGLLCWNLKGHVDVEEQNNHRSVLVVPEWEAEVSQEVRVCPGRGYILRVTAYKEGYGEGCVTIHEIEDNTDELKFSNCVEEEVYPNNTVTCNDYTATQEEYGGAYTSRNHGYGKSYESNSSVQADYASVYEEKADTDGRRDNHCESNRGYGDYTPLPAGYVTKELEYFPETDKVWVEIGETEGTFIVDSVELLLMEE

SEQ ID NO: 167 - protein, 244 aa, Bacillus thuringiensis TA476-1
TIQGGDDVFKENYVTLPGTFDECYPTYLYQKIDESKLKAYTRYQLRGYIGDSQDLEIYLIRYNAKHEIVNVPGTGSLWTLSVENSIGPCGEPNRCAPHLEWNPNLECSCREGEKCAHHSHHFSLDIDVGCTDLNEDLGVWAIFKIKTQDGHARLGNLEFLEEKPLVGEALARVKRAEKKWRDKREKLELETNIVYKEAKESVDALFVNSQYDRLQADTNIAMIHAADKRVHSIREAYLPELSII

SEQ ID NO: 168 - protein, 1165 aa, Bacillus thuringiensis aizawai HD68
MEINNQNQCVPYNCLSNPKEIILGEERLETGNTVADISLGLINFLYSNFVPGGGFIVGLLELIWGFIGPSQWDIFLAQIEQLISQRIEEFARNQAISRLEGLSNLYKVYVRAFSDWEKDPTNPALREEMRIQFNDMNSALITAIPLFRVQNYEVALLSVYVQAANLHLSILRDVSVFGERWGYDTATINNRYSDLTSLIHVYTNHCVDTYNQGLRRLEGRFLSDWIVYNRFRRQLTISVLDIVAFFPNYDIRTYPIQTATQLTREVYLDLPFINENLSPAASYPTFSAAESAIIRSPHLVDFLNSFTIYTDSLARYAYWGGHLVNSFRTGTTTNLIRSPLYGREGNTERPVTITASPSVPIFRTLSYITGLDNSNPVAGIEGVEFQNTISRSIYRKSGPIDSFSELPPQDASVSPAIGYSHRLCHATFLERISGPRIAGTVFSWTHRSASPTNEVSPSRITQIPWVKAHTLASGASVIKGPGFTGGDILTRNSMGELGTLRVTFTGRLPQSYYIRFRYASVANRSGTFRYSQPPSYGISFPKTMDAGEPLTSRSFAHTTLFTPITFSRAQEEFDLYIQSGVYIDRIEFIPVTATFEAEYDLERAQKVVNALFTSTNQLGLKTDVTDYHIDQVSNLVACLSDEFCLDEKRELSEKVKHAKRLSDERNLLQDPNFRGINRQPDRGWRGSTDITIQGGDDVFKENYVTLPGTFDECYPTYLYQKIDESKLKAYTRYQLRGYIEDSQDLEIYLIRYNAKHEIVNVPGTGSLWPLSVENQIGPCGEPNRCAPHLEWNPDLHCSCRDGEKCAHHSHHFSLDIDVGCTDLNEDLGVWVIFKIKTQDGHARLGNLEFLEEKPLLGEALARVKRAEKKWRDKRETLQLETTIVYKEAKESVDALFVNSQYDRLQADTNIAMIHAADKRVHRIREAYLPELSVIPGVNAAIFEELEERIFTAFSLYDARNIIKNGDFNNGLLCWNVKGHVEVEEQNNHRSVLVIPEWEAEVSQEVRVCPGRGYILRVTAYKEGYGEGCVTIHEIENNTDELKFNNCVEEEVYPNNTVTCINYTATQEEYEGTYTSRNRGYDEAYGNNPSVPADYASVYEEKSYTDRRRENPCESNRGYGDYTPLPAGYVTKELEYFPETDKVWIEIGETEGTFIVDSVELLLMEE

SEQ ID NO: 169 - protein, 1176 aa, Bacillus thuringiensis; identical to SEQ ID NO: 56

SEQ ID NO: 170 - protein, 1160 aa, Bacillus thuringiensis BTS00349A
MDINHQNQCIPYNCLSNPDAILLDAERLETGNTVADISLGLINFLYSNFVPGGGFIVGLLELIWGFVGPSQWEIFLAQIEQLISQRIEEFARNQAISRLEGLSNNYEIYTETFRAWEKDPSNPALREEMRTQFNVMNSALIAAIPLLRVRNYEVALLSVYVQAANLHLSVLRDVSVYGQRWGFDPATVNSRYSDLTRLIHVYTDHCVDTYNDGLKNLEGSRLSDWVVYNRFRRRLTISVLDIIAFFPNYDIEAYPIQTASQLTREVYLDLPFVNETLSPPASYPTFSAAESAIIRSPHLVDFLNSFTIYTDSLASYAYWGGHLVNSFRTGTTTNLIRSPLYGREGNTERPVTISASPSVPIFRTLSYFTGLNNNNPVAGIEGVEFQNTISRSIYRKSGPIDSFSELPPQDVSVSPAIGYSHRLCHATFLERISGPRIAGTVFSWTHRSASPINEVSPSRITQIPWVKAHTLASGASVIKGPGFTGGDILTRNSMGDLGALRVTFTGRLPQSYYIRFRYASVANRSGTFRYSQPPSYGISFPKTMDAGEALTSRSFAHTTLFTPITFSRAQEEFDLYIQSGVYIDRIEFIPVDATFESEINLERAQKAVNALFTSTNQLGLKTDVTDYHIDQVSNLVECLSDEFCLDEKRELSEKVKHAKRLSDERNLLQDPNFRGINRQPDRGWRGSTDITIQGGDDVFKENYVTLTGTFDECYPTYLYQKIDESKLKAYTRYQLRGYIEDSQDLEIYLIRYNAKHEIVNVPGTGSLWPLSVQSPIGKCGEPNRCAPHLEWNPDLDCSCRDEEKCAHHSHHFSLDIDVGCTDLNEDLGVWVIFKIKTQDGHARLGNLEFLEEKPLVGEALARVKRAEKKWRDKREKLELETNIVYKEAKESVDALFVNSQYDQLQADTNIAMIHAADKRVHSIREAYLPELSVIPGVNAGIFEELEGRIFTAYSLYDARNVIKNGDFNNGLSCWNVKGHVDVEEQNNHRSVLVVPEWEAEVSQEVRVCPGRGYILRVTAYKEGYGEGCVTIHEVDNNTDELKFSNCEKEQVYPGNTVACNDYNKNHGANACSSRNRGYDESYESNSSIPADYAPVYEEEAYTDGQRGNPCEFNRGHTPLPAGYVTAELEYFPETDTVWVEIGETEGTFIVDSVELLLMEE

SEQ ID NO: 171 - protein, 1160 aa, Bacillus thuringiensis B-Pr-88
MDINHQNQCIPYNCLSNPDAILLDAERLETGNTVADISLGLINFLYSNFVPGGGFIVGLLELIWGFVGPSQWEIFLAQIEQLISQRIEEFARNQAISRLEGLSNNYEIYTETFRAWEKDPSNPALREEMRTQFNVMNSALIAAIPLLRVRNYEVALLSVYVQAANLHLSVLRDVSVYGQRWGFDPATVNSRYSDLTRLIHVYTDHCVDTYNDGLKNLEGSRLSDWVVYNRFRRRLTISVLDIIAFFPNYDIEAYPIQTASQLTREVYLDLPFVNETLSPPASYPTFSAAESAIIRSPHLVDFLNSFTIYTDSLASYAYWGGHLVNSFRTGTTTNLIRSPLYGREGNTERPVTISASPSVPIFRTLSYFTGLNNNNPVAGIEGVEFQNTISRSIYRKSGPIDSFSELPPQDVSVSPAIGYSHRLCHATFLERISGPRIAGTVFSWTHRSASPINEVSPSRITQIPWVKAHTLASGASVIKGPGFTGGDILTRNSMGDLGALRVTFTGRLPQSYYIRFRYASVANRSGTFRYSQPPSYGISFPKTMDAGEALTSRSFAHTTLFTPITFSRAQEEFDLYIQSGVYIDRIEFIPVDATFESEINLERAQKAVNALFTSTNQLGLKTDVTDYHIDQVSNLVECLSDEFCLDEKRELSEKVKHAKRLSDERNLLQDPNFRGINRQPDRGWRGSTDITIQGGDDVFKENYVTLTGTFDECYPTYLYQKIDESKLKAYTRYQLRGYIEDSQDLEIYLIRYNAKHEIVNVPGTGSLWPLSVQSPIGKCGEPNRCAPHLEWNPDLDCSCRDEEKCAHHSHHFSLDIDVGCTDLNEDLGVWVIFKIKTQDGHARLGNLEFLEEKPLVGEALARVKRAEKKWRDKREKLELETNIVYKEAKESVDALFVNSQYDQLQADTNIAMIHAADKRVHSIREAYLPELSVIPGVNAGIFEELEGRIFTAYSLYDARNVIKNGDFNNGLSCWNVKGHVDVEEQNNHRSVLVVPEWEAEVSQEVRVCPGRGYILRVTAYKEGYGEGCVTIHEVDNNTDELKFSNCEKEQVYPGNTVACNDYNKNHGANACSSRNRGYDESYESNSSIPADYAPVYEEEAYTDGQRGNPSEFNRGHTPLPAGYVTAELEYFPETDTVWVEIGETEGTFIVDSVELLLMEE

SEQ ID NO: 172 - protein, 1173 aa, Bacillus thuringiensis JC291
MEIINNQNQCVPYNCLSNPENEILDIESLSSRSREQVAEISLGLTRFLLESLLPGASFGFALFDIIWGVIGPDQWNLFLAQIEQLIDQRIEAHVRNQAISRLEGLGDSYEVYIESLREWEGSPNNEGLQQDVRNRFSNTDNALITGYLFLREQGFEIPLLSVYVQAANLHLSILRDVSVFGERWGYDTATINNRYSDLTSLIHVYTNHCVDTYNQGLRRLEGRFLTDWIVYNRFRRQFTISVLDIVAFFPNYDIRTYPIHTATQLTREIYLDLPFINENLSPAASYPTFSAAESAIIRSPHLVDFLNSFTIYTDSLARYAYWGGHLVNCFRTGTTTNLIRSPLYGREGNTERPVTITASPSVPIFRTLSYITGLDNSNPVAGIEGVEFQNTISRSIYRKSGPIDSFNELPPQDASVSPSIGYSHRLCHATFLERISGPRIAGVVFPWTHRSASPTNEVSSSRKTQIPWVKAHTLASGASVIKGPGFTGGDILRRTSPGQISTLRVNITAPLSQRYRVRIRYASTTNLQFHTSIDGRPINQGNFSATMSSGSNLQSGSFRTVGFTTPFNFSNGSSVFTLSAHVFNSGNEVYIDRIEFVPAEVTFEAEYDLERAQKAVNELFTSSNQIGLKTDVTDYHIDQVSNLVECLSDEFCLDEKKELSEKVKHAKRLSDERNLLQDPNFRGINRQLDRGWRGSTDITIQGGDDVFKENYVTLPGTFDECYPTYLYQKIDESKLKAYTRYQLRGYIEDSQDLEIYLIRYNAKHEIVNVPGTGSLWPLSVENQIGPCGEPNRCAPHLEWNPDLHCSCRDGENVPIIPIISPWDIDVGCTDLNEDLGVWVIFKIKTQDGHARLGNLEFLEEKPLVGEALARVKRAEKKWRDKREKLELETNIVYKEAKESVDALFVNSQYDRLQADTNIAMIHAADKRVHSIREAYLPELSVIPGVNAAIFEELEGRIFTAFSLYDARNVIKNGDFNNGLSCWNVKGHVDVEEQNNHRSVLVVPEWEAEVSQEVRVCPGRGYILRVTAYKEGYGEGCVTIHEIENNTDELKFNNCVEEEVYPNNTVTCINYTATQEEYEGTYTSRNRGYDEAYGNNPSVPADYASVYEEKSYTDRRRENPCESNRGYGDYTPLPAGYVTKELEYFPETDKVWIEIGETEGTFIVDSVELLLMEE

SEQ ID NO: 173 - protein, 1171 aa, Bacillus thuringiensis kenyae 4F1
MEIVNNQNQCVPYNCLNNPENEILDIERSNSTVATNIALEISRLLASATPIGGILLGLFDAIWGSIGPSQWDLFLEQIELLIDQKIEEFARNQAISRLEGISSLYGIYTEAFREWEADPTNPALKEEMRTQFNDMNSILVTAIPLFSVQNYQVPFLSVYVQAANLHLSVLRDVSVFGQAWGFDIATINSRYNDLTRLIPIYTDYAVRWYNTGLDRLPRTGGLRNWARFNQFRRELTISVLDIISFFRNYDSRLYPIPTSSQLTREVYTDPVINITDYRVGPSFENIENSAIRSPHLMDFLNNLTIDTDLIRGVHYWAGHRVTSHFTGSSQVITTPQYGITANAEPRRTIAPSTFPGLNLFYRTLSNPFFRRSENITPTLGINVVQGVGFIQPNNAEVLYRSRGTVDSLNELPIDGENSLVGYSHRLSHVTLTRSLYNTNITSLPTFVWTHHSATNTNTINPDIITQIPLVKGFRLGGGTSVIKGPGFTGGDILRRNTIGEFVSLQVNINSPITQRYRLRFRYASSRDARITVAIGGQIRVDMTLEKTMEIGESLTSRTFSYTNFSNPFSFRANPDIIRIAEELPIRGGELYIDKIELILADATFEEEYDLERAQKAVNALFTSTNQLGLKTDVTDYHIDQVSNLVECLSDEFCLDEKRELSEKVKHAKRLSDERNLLQDPNFRGINRQPDRGWRGSTDITIQGGDDVFKENYVTLPGTFDECYPTYLYQKIDESKLKAYTRYELRGYIEDSQDLEIYLIRYNAKHETVNVPGTGSLWPLSAQSPIGKCGEPNRCAPHLEWNPNLDCSCRDGEKCAHHSHHFSLDIDVGCTDLNEDLGVWVIFKIKTQDGYARLGNLEFLEENPLLGEALARVKRAEKKWRDKCEKLEWETNIVYKEAKESVDALFVNSQYDRLQADTNIAMIHAADKRVHSIREAYLPELSVIPGVNAAIFEELEGRIFTAFSLYDARNVIKNGDFNNGLSCWNVKGHVDVEEQNNHRSVLVVPEWEAEVSQEVRVCPGRGYILRVTAYKEGYGEGCVTIHEIEDNTDELKFSNCVEEEVYPNNTVTCNNYTATQEEHEGTYTSRNRGYDEAYESNSSVHASVYEEKSYTDRRRENPCESNRGYGDYTPLPAGYVTKELEYFPETDKVWIEIGETEGTFIVDSVELLLMEE

SEQ ID NO: 174 - protein, 1171 aa, Bacillus thuringiensis BR64
MEIVNNQNQCVPYNCLNNPENEILDIERSNSTVATNIALEISRLLASATPIGGILLGLFDAIWGSIGPSQWDLFLEQIELLIDQKIEEFARNQAISRLEGISSLYGIYTEAFREWEADPTNPALKEEMRTQFNDMNSILVTAIPLFSVQNYQVPFLSVYVQAANLHLSVLRDVSVFGQAWGFDIATINSRYNDLTRLIPIYTDYAVRWYNTGLDRLPRTGGLRNWARFNQFRRELTISVLDIISFFRNYDSRLYPIPTSSQLTREVYTDPVINITDYRVGPSFENIENSAIRSPHLMDFLNNLTIDTDLIRGVHYWAGHRVTSHFTGSSQVITTPQYGITANAEPRRTIAPSTFPGLNLFYRTLSNPFFRRSENITPTLGINVVQGVGFIQPNNAEVLYRSRGTVDSLNELPIDGENSLVGYSHRLSHVTLTRSLYNTNITSLPTFVWTHHSATNTNTINPDIITQIPLVKGFRLGGGTSVIKGPGFTGGDILRRNTIGEFVSLQVNINSPITQRYRLRFRYASSRDARITVAIGGQIRVDMTLEKTMEIGESLTSRTFSYTNFSNPFSFRANPDIIRIAEELPIRGGELYIDKIELILADATFEEEYDLERAQKAVNALFTSTNQLGLKTDVTDYHIDQVSNLVECLSDEFCLDEKRELSEKVKHAKRLSDERNLLQDPNFRGINRQPDRGWRGSTDITIQGGDDVFKENYVTLPGTFDECYPTYLYQKIDESKLKAYTRYELRGYIEDSQDLEIYLIRYNAKHETVNVPGTGSLWPLSAQSPIGKCGEPNRCAPHLEWNPNLDCSCRDGEKCAHHSHHFSLDIDVGCTDLNEDLGVWVIFKIKTQDGYARLGNLEFLEEKPLLGEALARVKRAEKKWRDKCEKLEWETNIVYKEAKESVDALFVNSQYDRLQADTNIAMIHAADKRVHSIREAYLPELSVIPGVNAAIFEELEGRIFTAFSLYDARNVIKNGDFNNGLSCWNVKGHVDVEEQNNHRSVLVVPEWEAEVSQEVRVCPGRGYILRVTAYKEGYGEGCVAIHEIEDNTDELKFSNCVEEEVYPNNTVTCNNYTATQEEHEGTYTSRNRGYDEAYESNSSVHASVYEEKSYTDRRRENPCESNRGYGDYTPLPAGYVTKELEYLPETDKVWIEIGETEGTFIVDSVELLLMEE

SEQ ID NO: 175 - protein, 1171 aa, Bacillus thuringiensis kenyae; identical to SEQ ID NO: 173

SEQ ID NO: 176 - protein, 1171 aa, Bacillus thuringiensis kenyae PS81F
MEIVNNQNQCVPYNCLNNPENEILDIERSNSTVATNIALEISRLLASATPIGGILLGLFDAIWGSIGPSQWDLFLEQIELLIDQKIEEFARNQAISRLEGISSLYGIYTEAFREWEADPTNPALKEEMRTQFNDMNSILVTAIPLFSVQNYQVPFLSVYVQAANLHLSVLRDVSVFGQAWGFDIATINSRYNDLTRLIPIYTDYAVRWYNTGLDRLPRTGGLRNWARFNQFRRELTISVLDIISFFRNYDSRLYPIPTSSQLTREVYTDPVINITDYRVGPSFENIENSAIRSPHLMDFLNNLTIDTDLIRGVHYWAGHRVTSHFTGSSQVITTPQYGITANAEPRRTIAPSTFPGLNLFYRTLSNPFFRRSENITPTLGINVVQGVGFIQPNNAEVLYRSRGTVDSLNELPIDGENSLVGYSHRLSHVTLTRSLYNTNITSLPTFVWTHHSATNTNTINPDIITQIPLVKGFRLGGGTSVIKGPGFTGGDILRRNTIGEFVSLQVNINSPITQRYRLRFRYASSRDARITVAIGGQIRVDMTLEKTMEIGESLTSRTFSYTNFSNPFSFRANPDIIRIAEELPIRGGELYIDKIELILADATFEEEYDLERAQKAVNALFTSTNQLGLKTDVTDYHIDQVSNLVECLSDEFCLDEKRELSEKVKHAKRLSDERNLLQDPNFRGINRQPDRGWRGSTDITIQGGDDVFKENYVTLPGTFDECYPTYLYQKIDESKLKAYTRYELRGYIEDSQDLEIYLIRYNAKHETVNVPGTGSLWPLSAQSPIGKCGEPNRCAPHLEWNPNLDCSCRDGEKCAHHSHHFSLDIDVGCTDLNEDLGVWVIFKIKTQDGYARLGNLEFLEEKPLLGEALARVKRAEKKWRDKCEKLEWETNIVYKEAKESVDALFVNSQYDRLQADTNIAMIHAADKRVHSIREAYLPELSVIPGVNAAIFEELEGRIFTAFSLYDARNVIKNGDFNNGLSCWNVKGHVDVEEQNNHRSVLVVPEWEAEVSQEVRVCPGRGYILRVTAYKEGYGEGCVTIHEIEDNTDELKFSNCVEEEVYPNNTVTCNNYTATQEEHEGTYTSRNRGYDEAYESNSSVHASVYEEKSYTDRRRENPCESNRGYGDYTPLPAGYVTKELEYFPETDKVWIEIGETEGTFIVDSVELLLMEE

SEQ ID NO: 177 - protein, 1171 aa, Bacillus thuringiensis kenyae LBIT-147
MEIVNNQNQCVPYNCLNNPENEILDIERSNSTVATNIALEISRLLASATPIGGILLGLFDAIWGSIGPSQWDLFLEQIELLIDQKIEEFARNQAISRLEGISSLYGIYTEAFREWEADPTNPALKEEMRTQFNDMNSILVTAIPLFSVQNYQVPFLSVYVQAANLHLSVLRDVSVFGQAWGFDIATINSRYNDLTRLIPIYTDYAVRWYNTGLDRLPRTGGLRNWARFNQFRRELTISVLDIISFFRNYDSRLYPIPTSSQLTREVYTDPVINITDYRVGPSFENIENSAIRSPHLMDFLNNLTIDTDLIRGVHYWAGHRVTSHFTGSSQVITTPQYGNSQNAEPRRTIAPSTFPGLNLFYRTLSNPFFRRSENITPTLGINVVQGVGFIQPNNAEVLYRSRGTVDSLNELPIDGENSLVGYSHRLSHVTLTRSLYNTNITSLPTFVWTHHSATNTNTINPDIITQIPLVKGFRLGGGTSVIKGPGFTGGDILRRNTIGEFVSLQVNINSPITQRYRLRFRYASSRDARITVAIGGQIRVDMTLEKTMEIGESLTSRTFSYTNFSNPFSFRANPDIIRIAEELPIRGGELYIDKIELILADATFEEEYDLERAQKAVNALFTSTNQLGLKTDVTDYHIDQVSNLVECLSDEFCLDEKRELSEKVKHAKRLSDERNLLQDPNFRGINRQPDRGWRGSTDITIQGGDDVFKENYVTLPGTFDECYPTYLYQKIDESKLKAYTRYELRGYIEDSQDLEIYLIRYNAKHETVNVPGTGSLWPLSAQSPIGKCGEPNRCAPHLEWNPNLDCSCRDGEKCAHHSHHFSLDIDVGCTDLNEDLGVWVIFKIKTQDGYARLGNLEFLEEKPLLGEALARVKRAEKKWRDKCEKLEWETNIVYKEAKESVDALFVNSQYDRLQADTNIAMIHAADKRVHSIREAYLPELSVIPGVNAAIFEELEGRIFTAFSLYDARNVIKNGDFNNGLSCWNVKGHVDVEEQNNHRSVLVVPEWEAEVSQEVRVCPGRGYILRVTAYKEGYGEGCVTIHEIEDNTDELKFSNCVEEEVYPNNTVTCNNYTATQEEHEGTYTSRNRGYDEAYESNSSVHASVYEEKSYTDRRRENPCESNRGYGDYTPLPAGYVTKELEYFPETDKVWIEIGETEGTFIVDSVELLLMEE

SEQ ID NO: 178 - protein, 1171 aa, Bacillus thuringiensis YBT-032; identical to SEQ ID NO: 176

SEQ ID NO: 179 - protein, 1171 aa, Bacillus thuringiensis JC190; identical to SEQ ID NO: 176

SEQ ID NO: 180 - protein, 1171 aa, Bacillus thuringiensis HZM2
MEIVNNQNQCVPYNCLNNPENEILDIERSNSTVATNIALEISRPLASATPIGGILLGLFDAIWGSIGPSQWDLFLEQIELLIDQKIEEFARNQAISRLEGISSLYGIYTEAFREWEADPTNPALKEEMRTQFNDMNSILVTAIPLFSVQNYQVPFLSVYVQAANLHLSVLRDVSVFGQAWGFDIATINSRYNDLTRLIPIYTDYAVRWYNTGLDRLPRTGGLRNWARFNQFRRELTISVLDIISFFRNYDSRLYPIPTSSQLTREVYTDPVINITDYRVGPSFENIENSAIRSPHLMDFLNNLTIDTDLIRGVHYWAGHRVTSHFTGSSQVITTPQYGITANAEPRRTIAPSTFPGLNLFYRTLSNPFFRRSENITPTLGINVVQGVGFIQPNNAEVLYRSRGTVDSLNELPIDGENSLVGYSHRLSHVTLTRSLYNTNITSLPTFVWTHHSATNTNTINPDIITQIPLVKGFRLGGGTSVIKGPGFTGGDILRRNTIGEFVSLQVNINSPITQRYRLRFRYASSRDARITVAIGGQIRVDMTLEKTMEIGESLTSRTFSYTNFSNPFSFRANPDIIRIAEELPIRGGELYIDKIELILADATFEEEYDLERAQKAVNALFTSTNQLGLKTDVTDYHIDQVSNLVECLSDEFCLDEKRELSEKVKHAKRLSDERNLLQDPNFRGINRQPDRGWRGSTDITIQGGDDVFKENYVTLPGTFDECYPTYLYQKIDESKLKAYTRYELRGYIEDSQDLEIYLIRYNAKHETVNVPGTGSLWPLSAQSPIGKCGEPNRCAPHLEWNPNLDCSCRDGEKCAHHSHHFSLDIDVGCTDLNEDLGVWVIFKIKTQDGYARLGNLEFLEEKPLLGEALARVKRAEKKWRDKCEKLEWETNIVYKEAKESVDALFVNSQYDRLQADTNIAMIHAADKRVHSIREAYLPELSVIPGVNAAIFEELEGRIFTAFSLYDARNVIKNGDFNNGLSCWNVKGHVDVEEQNNHRSVLVVPEWEAEVSQEVRGCPGRGYILRVTAYKEGYGEGCVTIHEIEDNTDELKFSNCVEEEVYPNNTVTCNNYTATQEEHEGTYTSRNRGYDEAYESNSSVHASVYEEKSYTDRRRENPCESNRGYGDYTPLPAGYVTKESEYFPETDKVWIEIGETEGTFIVDSVELLLMEE

SEQ ID NO: 181 - protein, 1174 aa, Bacillus thuringiensis aizawai PS81A2
MENNIENQCIPYNCLNNPEVEILGIERSNSNVAAEIGLGLSRLLVSRIPLGDFILGLFDVIWGAIGPSQWDIFLEQIELLIGQRIEEFARNQAISRLQGLSNLYRIYTNAFKNWEVDPTNPALREEMRIQFNDMNSALTTAIPLFSVQGYEIPLLSVYVQAANLHLSVLRDVSVFGQRWGFDVATINSRYNDLTRLIGEYTDYAVRWYNTGLNRLPRNEGVRGWARFNRFRRELTISVLDIISFFQNYDSRLYPIPTIYQLTREVYTDPVINITDYRVTPSFESIENSAIRSPHLMDFLNNIIIDTDLIRGVHYWAGHRVTSHFTGSSQVISSPQYGITANAEPSRTIAPSTFPGLNLFYRTLSDPFFRRSDNIMPTLGINVVQGVGFIQPNNGEVLYRRRGTVDSLDELPIDGENSLVGYSHRLSHVTLTRSLYNTNITSLPTFVWTHHSATDRNIIYPDVITQIPLVKSFSLTSGTSVVRGPGFTGGDIIRTNVNGNVLSMSLNFSNTSLQRYRVRVRYAASQTMVMRVNVGGSTTFDQGFPSTMSANGSLTSQSFRFAEFPVGISTSGSQTAGISISNNPGRQTFHLDRIEFIPVDATFEAEYDLERAQKAVNSLFTSSNQIELKTDVTDYHIDQVSNLVDCLSDEFCLDEKRELSEKVKHAKRLSDERNLLQDPNFRGINRQPDRGWRGSTDITIQGGDDVFKENYVTLPGTFDECYPTYLYQKIDESKLKAYNRYQLRGYIEDSQDLEIYLIRYNAKHETVNVPGTGSLWPLSVESPIGRCGEPNRCVPHLEWNPDLDCSCRDGEKCAHHSHHFSLDIDVGCTDLQEDLGVWVVFKIKTQEGYARLGNLEFIEEKPLIGEALSRVKRAEKKWRDKREKLQLETKRVYTEAKEAVDALFVDSQYDRLQADTNIGMIHAADRLVHQIHEAYLPELPFIPGINVVIFEELENRISTALSLYDARNVIKNGDFNNGLSCWNVKGHVDVVEQNNHRSVLVVPEWEAEVSQTIRVCPGRGYILRVTAYKEGYGEGCVTIHEIENNTDELKFKNCEEEEVYPTDTGTCNDYTAHQGTAGSTDSCNSRNIRYEDAYEMNTTASVNYKPTYEEERYTDVQGDNHCEYDRGYVNYRPVPAGYVTKELEYFPETDKVWIEIGETEGKFIVDNVELLLMEE

SEQ ID NO: 182 - protein, 1174 aa, Bacillus thuringiensis aizawai EG6346
MENNIQNQCVPYNCLNNPEVEILNEERSTGRLPLDISLSLTRFLLSEFVPGVGVAFGLFDLIWGFITPSDWSLFLLQIEQLIEQRIETLERNRAITTLRGLADSYEIYIEALREWEANPNNAQLREDVRIRFANTDDALITAINNFTLTSFEIPLLSVYVQAANLHLSLLRDAVSFGQGWGLDIATVNNHYNRLINLIHRYTKHCLDTYNQGLENLRGTNTRQWARFNQFRRDLTLTVLDIVALFPNYDVRTYPIQTSSQLTREIYTSSVIEDSPVSANIPNGFNRAEFGVRPPHLMDFMNSLFVTAETVRSQTVWGGHLVSSRNTAGNRINFPSYGVFNPGGAIWIADEDPRPFYRTLSDPVFVRGGFGNPHYVLGLRGVAFQQTGTNHTRTFRNSGTIDSLDEIPPQDNSGAPWNDYSHVLNHVTFVRWPGEISGSDSWRAPMFSWTHRSATPTNTIDPERITQIPLVKAHTLQSGTTVVRGPGFTGGDILRRTSGGPFAYTIVNINGQLPQRYRARIRYASTTNLRIYVTVAGERIFAGQFNKTMDTGDPLTFQSFSYATINTAFTFPMSQSSFTVGADTFSSGNEVYIDRFELIPVTATFEAEYDLERAQKAVNALFTSINQIGIKTDVTDYHIDQVSNLVDCLSDEFCLDEKRELSEKVKHAKRLSDERNLLQDPNFKGINRQLDRGWRGSTDITIQRGDDVFKENYVTLPGTFDECYPTYLYQKIDESKLKPYTRYQLRGYIEDSQDLEIYLIRYNAKHETVNVLGTGSLWPLSVQSPIRKCGEPNRCAPHLEWNPDLDCSCRDGEKCAHHSHHFSLDIDVGCTDLNEDLDVWVIFKIKTQDGHARLGNLEFLEEKPLVGEALARVKRAEKKWRDKREKLELETNIVYKEAKESVDALFVNSQYDQLQADTNIAMIHAADKRVHRIREAYLPELSVIPGVNVDIFEELKGRIFTAFFLYDARNVIKNGDFNNGLSCWNVKGHVDVEEQNNHRSVLVVPEWEAEVSQEVRVCPGRGYILRVTAYKEGYGEGCVTIHEIENNTDELKFSNCVEEEVYPNNTVTCNDYTANQEEYGGAYTSRNRGYDETYGSNSSVPADYASVYEEKSYTDGRRDNPCESNRGYGDYTPLPAGYVTKELEYFPETDKVWIEIGETEGTFIVDSVELLLMEE

SEQ ID NO: 183 - protein, 1174 aa, Bacillus thuringiensis aizawai PS81I; identical to SEQ ID NO: 182

SEQ ID NO: 184 - protein, 1174 aa, Bacillus thuringiensis BTS00349A
MKNNIQNQCVPYNCLSNPEVEILSEERSTGRLPLDISLSLTRFLLSEFVPGVGVAFGLFDLIWGFITPSEWSLFLLQIEQLIEQRIETLERNRAITTLRGLADSYEVYLEALREWEENPNNAQLREDVRIRFANTDDALITAINNFTLTSFEIPLLSVYVQAANLHLSLLRDAVSFGQGWGLDIATVNNHYNRLINLIHRYTEHCLDTYNQGLENLRGTNTRQWSRFNQFRRELTLTVLDIVALFPNYDARAYPIQTSSQLTREIYTSSVIEDSPVSANIPNGFNRAEFGVRPPHLMDFMNSLFVTAETVRSQTVWGGHLVSSRNTAGNPINFPIYGIFNPGGAIWIADEDPRPFYRTLSDPVFVRGGFGNPHYVLGLRGVAFQQTGTNHTRTFRNSGTIDSLDEIPPQDNSGAPWNDYSHVLNHVTFVRWPGEIAGSDSWRAPMFSWTHRSADRTNIINPNIITQIPAVKAHNLHSGSTVVRGPGFTGGDLLRRTNTGTFADIRVNITGPLSQRYRVRIRYASTTDLQFFTRINGTSVNQGNFQRTMNRGGNLESGNFRTAGFSTPFSFSNAQSTFTLGTQAFSNQEVYIDRIEFVPAEVTFEAESDLERAQKAVNALFTSTSQLGLKTNVTGYHIDQVSNLVACLSDEFCLDEKRELSEKVKHAKRLSDKRNLLQDPNFRGINRQPDHGWRGSTDITIQGGDDVFKENYVTLPGTFDECYPTYLYQKIDESKLKAYTRYQLRGYIEDSQDLEIYLIRYNSKHEIVNVPGTGSLWPLSVENQIGPCGEPNRCAPHLEWNPDLHCSCRDGEKCVHHSHHFSLDIDVGCTDLNEDLGVWLIFKIKTQDGHARLGNLEFLEEEPLLGEALARVKRAEKKWRDKREKLQLETNIVYKEAKESVDALFVNSQYDRLQADTNIAMIHAADKRVHRIREAYLPELSVIPGVNAAIFEELEGRIFTAYSLYDARNVIKNGNFNNGLLCWNVKGHVDVEEQNNHRSVLVIPEWEAEVSQKVRVCPGRGYILRVTAYKEGYGEGCVTIHEIEDNTDELKFSNCVEEGYPNNTVTCNEYTMNQGVGECTDACNVRNRGYEDAYGHNPSTPVHYTTPYEEETYTDERRENPCEANKGYVNYTPLPVGYVTKELEYFPETDTVWIEIGETEGTFIVDSVELLLMEE

SEQ ID NO: 185 - protein, 1168 aa, Bacillus thuringiensis morrisoni INA67
MKNNIQNQCVPYNCLSNPEVEILSEERSTGRLPLDISLSLTRFLLSEFVPGVGVAFGLFDLIWGFITPSEWSLFLLQIEQLIEQRIETLERNRAITTLRGLADSYEVYLEALREWEENPNNAQLREDVRIRFANTDDALITAINNFTLTSFEIPLLSVYVQAANLHLSLLRDAVSFGQGWGLDIATVNNHYNRLINLIHRYTEHCLDTYNQGLENLRGTNTRQWSRFNQFRRELTLTVLDIVALFPNYDARAYPIQTSSQLTREIYTSSVIEDSPVSANIPNGFNRAEFGVRPPHLMDFMNSLFVTAETVRSQTVWGGHLVSSRNTAGNPINFPIYGIFNPGGAIWIADEDPRPFYRTLSDPVFVRGGFGNPHYVLGLRGVAFQQTGTNHTRTFRNSGTIDSLDEIPPQDNSGAPWNDYSHVLNHVTFVRWPGEIAGSDSWRAPMFSWTHRSADRTNIINPNIITQIPAVKAHNLHSGSTVVRGPGFTGGDLLRRTNTGTFADIRVNITGPLSQRYRVRIRYASTTDLQFFTRINGTSVNQGNFQRTMNRGGNLESGNFRTAGFSTPFSFSNAQSTFTLGTQAFSNQEVYIDRIEFVPAEVTFEAESDLERAQKAVNALFTSTSQLGLKTNVTGYHIDQVSNLVACLSDEFCLDEKRELSEKVKHAKRLSDKRNLLQDPNFRGINRQPDHGWRGSTDITIQGGDDVFKENYVTLPGTFDECYPTYLYQKIDESKLKAYTRYQLRGYIEDSQDLEIYLIRYNSKHEIVNVPGTGSLWPLSVENQIGPCGEPNRCAPHLEWNPDLHCSCRDGEKCVHHSHHFSLDIDVGCTDLNEDLGVWLIFKIKTQDGHARLGNLEFLEEEPLLGEALARVKRAEKKWRDKREKLQLETNIVYKEAKESVDALFVNSQYDRLQADTNIAMIHAADKRVHRIREAYLPELSVIPGVNAAIFEELEGRIFTAYSLYDARNVIKNGNFNNGLLCWNVKGHVDVEEQNNHRSVLVIPEWEAEVSQKVRVCPGRGYILRVTAYKEGYGEGCVTIHEVDNNTDELKFSNCEKEQVYPGNTVACNDYNKNHGANACSSRNRGYDESYESNSSIPADYAPVYEEEAYTDGQRGNPCEFNRGHTPLPAGYVTAELEYFPETDTVWVEIGETEGTFIVDSVELLLMEE

SEQ ID NO: 186 - protein, 1169 aa, Bacillus thuringiensis morrisoni
MKNNIQNQCVPYNCLSNPEVEILSEERSTGRLPLDISLSLTRFLLSEFVPGVGVAFGLFDLIWGFITPSEWSLFLLQIEQLIEQRIETLERNRAITTLRGLADSYEVYLEALREWEENPNNAQLREDVRIRFANTDDALITAINNFTLTSFEIPLLSVYVQAANLHLSLLRDAVSFGQGWGLDIATVNNHYNRLINLIHRYTEHCLDTYNQGLENLRGTNTRQWSRFNQFRRELTLTVLDIVALFPNYDARAYPIQTSSQLTREIYTSSVIEDSPVSANIPNGFNRAEFGVRPPHLMDFMNSLFVTAETVRSQTVWGGHLVSSRNTAGNPINFPIYGVFNPGGAIWIADEDPRPFYRTLSDPVFVRGGFGNPHYVLGLRGVGFQQTGTNHTRTFRNSGTIDSLDEIPPQDNSGAPWNDYSHVLNHVTFVRWPGEIAGSDSWRAPMFSWTHRSADRTNIINPNIITQIPAVKAHNLHSGSTVVRGPGFTGGDLLRRTNTGTFADIRVNITGPLSQRYRVRIRYASTTDLQFFTRINGTSVNQGNFQRTMNRGGNLESGNFRTAGFSTPFSFSNAQSTFTLGTQAFSNQEVYIDRIEFVPAEVTFEAESDLERAQKAVNALFTSTSQLGLKTNVTGYHIDQVSNLVACLSDEFCLDEKRELSEKVKHAKRLSDKRNLLQDPNFRGINRQPDHGWRGSTDITIQGGDDVFKENYVTLPGTFDECYPTYLYQKIDESKLKAYTRYQLRGYIEDSQDLEIYLIRYNSKHEIVNVPGTGSLWPLSVENQIGPCGEPNRCAPHLEWNPDLHCSCRDGEKCVHHSHHFSLDIDVGCTDLNEDLGVWLIFKIKTQDGHARLGNLEFLEEEPLLGEALARVKRAEKKWRDKREKLQLETNIVYKEAKESVDALFVNSQYDRLQADTNIAMIHAADKRVHRIREAYLPELSVIPGVNAAIFEELEGRIFTAYSLYDARNVIKNGNFNNGLLCWNVKGHVDVEEQNNHRSVLVVPEWEAEVSQEVRVCPGRGYILRVTAYKEGYGEGCVTIHEVDNNTDELKFSSNCEKEQVYPGNTVACNDYNKNHGANACSSRNGGYDESYESNSSIPADYAPVYEEEAYTDGQRGNPCEFNRGHTPLPAGYVTAELEYFPETDTVWVEIGETEGTFIVDSVELLLMEE

SEQ ID NO: 187 - protein, 1174 aa, Bacillus thuringiensis B-Pr-88; identical to SEQ ID NO: 184

SEQ ID NO: 188 - protein, 1168 aa, Bacillus thuringiensis 012
MENNIQNQCVPYNCLSNPEVEILSEERSTGRLPLDISLSLTRFLLSEFVPGVGVAFGLFDLIWGFITPSEWSLFLLQIEQLIEQRIETLERNRAITTLRGLADSCEVYLEALREWEENPNNAQLREDVRIRFANTDDALITAINNFTLTSFEIPLLSVYVQAANLHLSLLRDAVSFGQGWGLDIATVNNHYNRLINLIHRYTEHCLDTYNQGLENLRGTNTRQWSRFNQFRRELTLTVLDIVALFPNYDARAYPIQTSSQLTREIYTSSVIEDSPVSANIPNGFNRAEFGVRPPHLMDFMNSLFVTAETVRSQTVWGGHLVSSRNTAGNPINFPIYGVFNPGGAIWIADEDPRPFYRTLSDPVFVRGGFGNPHYVLGLRGVGFQQTGTNHTRTFRNSGTIDSLDEIPPQDNSGAPWNDYSHVLNHVTFVRWPGEIAGSDSWRAPMFSWTHRSADRTNIINPNIITQIPAVKAHNLHSGSTVVRGPGFTGGDLLRRTNTGTFADIRVNITGPLSQRYRVRIRYASTTDLQFFTRINGTSVNQGNFQRTMNRGDNLESGNFRTAGFSTPFSFSNAQSTFTLGTQAFSNQEVYIDRIEFVPAEVTFEAESDLERAQKAVNALFTSTSQLGLKTNVTGYHIDQVSNLVACLSDEFCLDEKRELSEKVKHAKRLSDKRNLLQDPNFRGINRQPDHGWRGSTDITIQGGDDVFKENYVTLPGTFDECYPTYLYQKIDESKLKAYTRYQLRGYIEDSQDLEIYLIRYNSKHEIVNVPGTGSLWPLSVENQIGPCGEPNRCAPHLEWNPDLHCSCRDGEKCVHHSHHFSLDIDVGCTDLNEDLGVWLIFKIKTQDGHARLGNLEFLEEEPLLGEALARVKRAEKKWRDKREKLQLETNIVYKEAKESVDALFVNSQYDRLQADTNIAMIHAADKRVHRIREAYLPELSVIPGVNAAIFEELEGRIFTAYSLYDARNVIKNGNFNNGLLCWNVKGHVDVEEQNNHRSVLVVPEWEAEVSQEVRVCPGRGYILRVTAYKEGYGEGCVTIHEVDNNTDELKFSSCEKEQVNPGNTVACNDYNKNHGANACSSRSRGYDESYESNSSIPADYAPVYEEEAYTDGQRGNPCEFNRGHTPLPAGYVTAELEYFPETDTVWVEIGETEGTFIVDSVELLLMEE

SEQ ID NO: 189 - protein, 1174 aa, Bacillus thuringiensis 087
MENNIQNQCVPYNCLSNPEVEILSEERSTGRLPLDISLSLTRFLLSEFVPGVGVAFGLFDLIWGFITPSEWSLFLLQIEQLIEQRIETLERNRAITTLRGLADSYEVYLEALREWEENPNNAQLREDVRIRFANTDDALITAINNFTLTSFEIPLLSVYVQAANLHLSLLRDAVSFGQGWGLDIATVNNHYNRLINLIHRYTEHCLDTYNQGLENLRGTNTRQWSRFNQFRRELTLTVLDIVALFPNYDAGAYPIQTSSQLTREIYTSSVIEDSPVSANIPNGFNRAEFGVRPPHLMDFMNSLFVTAETVRSQTVWGGHLVSSRNTAGNPINFPIYGIFNPGGAIWIADEDPRPFYRTLSDPVFVRGGFGNPHYVLGLRGVAFQQTGTNHTRTFRNSGTIDSLDEIPPQDNSGAPWNDYSHVLNHVTFVRWPGEIAGSDSWRAPMFSWTHRSADRTNIINPNIITQIPAVKAHNLHSGSTVVRGPGFTGGDLLRRTNTGTFADIRVNITGPLSQRYRVRIRYASTTDLQFFTRINGTSVNQGNFQRTMNRGGNLESGNFRTAGFSTPFSFSNAQSTFTLGTQAFSNQEVYIDRIEFVPAEVTFEAESDLERAQKAVNALFTSTSQLGLKTNVTGYHIDQVSNLVACLSDEFCLDEKRELSEKVKHAKRLSDKRNLLQDPNFRGISRQPDHGWRGSTDITIQGGDDVFKENYVTLPGTFDECYPTYLYQKIDESKLKAYTRYQLRGYIEDSQDLEIYLIRYNSKHEIVNVPGTGSLWPLSVENQIGPCGEPNRCAPHLEWNPDLHCSCRDGEKCVHHSHHFSLDIDVGCTDLNEDLGVWLIFKIKTQDGHARLGNLEFLEEEPLLGEALARVKRAEKKWRDKREKLQLETNIVYKEAKESVDALFVNSQYDRLQADTNIAMIHAADKRVHRIREAYLPELSVIPGVNAAIFEELEGRIFTAYSLYDARNVIKNGNFNNGLLCWNVKGHVDVEEQNNHRSVLVIPEWEAEVSQKVRVCPGRGYILRVTAYKEGYGEGSVTIHEIEDNTDELKFSNCVEEGYPNNTVTCNEYTMNQGVGECTDACNVRNRGYEDAYGHNPSTPVHYTTPYEEETYTDERRENPCEANKGYVNYTPLPVGYVTKELEYFPETDKVWVEIGETEGTFIVDSVELLLMEE

SEQ ID NO: 190 - protein, 1166 aa, Bacillus thuringiensis BTS0349A
MEISDQNQYIPYNCLNNPESEIFNARNSNFGLVSQVSSGLTRFLLEAAVPEAGFALGLFDIIWGALGVDQWSLFLRQIEQLIRQEITELERNRATAILTGLSSSYNLYVEALREWENDPNNPASQERVRTRFRLTDDAIVTGLPTLAIRNLEVVNLSVYTQAANLHLSLLRDAVYFGERWGLTQANIEDLYTRLTSNIQEYSDHCARWYNQGLNEIGGISRRYLDFQRDLTISVLDIVALFPNYDIRTYPIPTQSQLTREIYTSPVVAGNINFGLSIANVLRAPHLMDFIDRIVIYTNSVRSTPYWAGHEVISRRTGQGQGNEIRFPLYGVAANAEPPVTIRPTGFTDEQRQWYRARSRVVSFRSSGQDFSLVDAVGFLTIFSAVSIYRNGFGFNTDTIDEIPIEGTDPFTGYSHRLCHVGFLASSPFISQYARAPIFSWTHRSATLTNTIAPDVITQIPLVKAFNLHSGATIVKGPGFTGGDILRRTNVGSFGDMRVNITAPLSQRYRVRIRYASTTDLQFYTNINGTTINIGNFSSTMDSGDDLQYGRFRVAGFTTPFTFSDANSTFTIGAFGFSPNNEVYIDRIEFVPAEVTFEAEYDLEKAQKAVNALFTSSNQIGLKTDVTDYHIDKVSNLVECLSDEFCLDEKRELSEKVKHAKRLSDERNLLQDPNFRGINRQPDRGWRGSTDITIQGGDDVFKENYVTLPGTFDGCYPTYLYQKIDESKLKVYTRYQLRGYIEDSQDLEIYLIRYNAKHETVNVPGTGSLWPLSAQSPIGKCGEPNRCAPHLEWNPDLDCSCRNGEKCAHHSHHFSLDIDVGCTDLNEDLGVWVIFKIKTQDGHARLGNLEFLEEKPLLGEALARVKRAEKKWRDKREKLELETNIVYKEAKESVDALFVNSQYDQLQADTNIAMIHAADKRVHSIREAYLPELSVIPGVNAAIFEELEGRIFTAFSLYDARNVIKNGDFNNGLSCWNVKGHVDVEEQNNHRSVLVVPEWEAEVSQEVRVCPGRGYILRVTAYKEGYGEGCVTIHEIENNTDELKFSNCVEEEVYPNNTVTCNDYTANQEEYKGAYTSHNRGYDEAYGNNPSVPADYTPVYEEKAYTDGRRENPCESNRGYGDYTPLPAGYVTKELEYFPETDKVWIEIGETEGTFIVESVELLLMEE

SEQ ID NO: 191 - protein, 1173 aa, Bacillus thuringiensis wuhanensis
MEISDQNQYIPYNCLNNPESEIFNARNSNFGLVSQVSSGLTRFLLEAAVPEAGFALGLFDIIWGALGVDQWSLFLRQIEQLIRQEITELERNRATAILIGLSSSYNLYVEALREWENDPNNPASQERVRTRFRLTDDAIVTGLPTLAIRNLEVVNLSVYTQAANLHLSLLRDAVYFGERWGLTQANIEDLYTRLTSNIQEYSDHCARWYNQGLNEIGGISRRYLDFQRDLTISVLDIVAPFSPNYDIRTYPIPTQSQLTREIYTSPVVAGNINFGLSIANVLRAPHLMDFIDRIVIYTNSVRSTPYWAGHEVISRRTGQAQGNEIRFPLYGVAANAEPPVTIRPTGFTDEQRQWYRARSLLSRFRSSGQDFSLVDAVAFLTIFSAVSIYRNGFGFNTDTIDEIPIEGTDPFTGYSHRLCHVGFLASSPFISQYARAPIFSWTHRSATLTNTIAPDVITQIPLVKAFNLHSGATIVKGPGFTGGDILRRTNVRSFRDMRVNITAPLSQRYRVRIRYASTTDLQFYTNINGTTINIGNFSSTMDSGDDLQYGRFRVAGFTTPFTFSRCKQTFHNRSFWFSPKLTEVYIDRIEFVPAEVTFEAEYDLEKAQKAVNALFTSSNQIGLKTDVTDYHIDKVSNLVECLSDEFCLDEKRELSEKVKHAKRLSDERNLLQDPNFRGINRQPDRGWRGSTDITIQGGDDVFKENYVTLPGTFDGCYPTYLYQKIDESKLKAYTRYQLRGYIEDSQDLEIYLIRYNAKHETVNVPGTGSLWPLSAQSPIGKCGEPNRCAPHLEWNPYLDCSCRNGKKCAHHSHHFSLDIDVGCTDLNEDLGVWVIFKIKTQDGHARLGNLEFLEEKPLLGEALARVKRAEKKWRDKREKLELETNIVYKEAKESVDALFVNSQYDQLQADTNIAMIHAADKRVHSIREAYLPELSVIPGVNAAIFEELEGRIFTAFSLYDARNVIKNGDFNNGLSCWNVKGHVDVEEQNNHRSVLVVPEWEAEVSQEVRVCPGRGYILRVTAYKEGYGEGCVTIHESRTIQRTEIQQLLEEEVYPNNTVTCNDYTANQEEYKGAYTSHNRGYDEAYGNNPSVPADYTPVYEEKAYTDGRRDNPCESNRGYGDYTPLPAGYVSKELEYFPETDKVWIEIGETEGTFIVESVNYSLWRNRIRFKM

SEQ ID NO: 192 - protein, 1169 aa, Bacillus thuringiensis wuhanensis HD525
MEINNQNQCVPYNCLNNPESEILNVAIFSSEQVAEIHLKITRLILENFLPGGSFAFGLFDLIWGIFNEDQWSAFLRQVEELINQRITEFARGQAIQRLVGFGRSYDEYILALKEWENDPDNPASKERVRTRFRTTDDALLTGVPLMAIPGFELATLSVYAQSANLHLALLRDAVFFGERWGLTQTNINDLYSRLKNSIRDYTNHCVRFYNIGLGNLNVIRPEYYRFQRELTISVLDLVALFPNYDIRTYPIPTKSQLTREIYTDPIISPGAQAGYTLQDVLREPHLMDFLNRLIIYTGEYRGIRHWAGHEVESSRTGMMTNIRFPLYGTAATAEPTRFITPSTFPGLNLFYRTLSAPIFRDEPGANIIIRYRTSLVEGVGFIQPNNGEQLYRVRGTLDSLDQLPLEGESSLTEYSHRLCHVRFAQSLRNAEPLDYARVPMFSWTHRSATPTNTIDPDVITQIPLVKAFNLHSGATVVRGPGFTGGDILRRTNAGNFGDMRVNITAPLSQRYRVRIRYASTANLQFHTSINGRAINQANFPATMNSGENLQSGSFRVAGFTTPFTFSDALSTFTIGAFSFSSNNEVYIDGIEFVPAEVTFATESDQDRAQKAVNALFTSSNQIGLKTDVTNYHIDQVSNLVECLSDEFCLDEKRELSEKVKHAKRLCDERNLLQDPNFRGINREPDRGWRGSTDITIQRGDDVFKENYVTLPGTFDECYPTYLYQKIDESKLKAYTRYELRGYIEDSQDLEIYLIRYNAKHETVNVPGTGSLWPLSAQSPIGKCGEPNRCATHLEWNPDLDCSCRDGEKCAHHSHHFSLDIDVGCTDLNEDLGVWVIFKIKTQDGHARLGNLEFLEEKPLLGEALARVKRAEKKWRDKREKLELETNIVYKEAKKSVDALFVNSQYDRLQADTNIAIIHAADKRVHSIREAYLPELSVIPGVNAAIFEELEGRIFTAYSLYDARNVIKNGDFNNGLSCWNVKGHVDVEEQNNHRSVLVVPEWEAEVSQEVRVCPGRGYILRVTAYKEGYGEGCVTIHEIEDNTDELKFSNCVEEEIYPNNTVTCNDYTATQEEYEGTYTSRNRGYDGAYESNSSVPADYASAYEEKAYTDGRRDNTCESNRGYGDYTPLPAGYVTKELEYFPETDKVWIEIGETEGTFIVDSVELLLMEE

SEQ ID NO: 193 - protein, 1169 aa, Bacillus thuringiensis B-Pr-88
MEINNQNQCVPYNCLNNPESEILNVAIFSSEQVAEIHLKITRLILENFLPGGSFAFGLFDLIWGIFNEDQWSAFLRQVEELINQRITEFARGQAIQRLVGFGRSYDEYILALKEWENDPDNPASKERVRTRFRTTDDALLTGVPLMAIPGFELATLSVYAQSANLHLALLRDAVFFGERWGLTQTNINDLYSRLKNSIRDYTNHCVRFYNIGLGNLNVIRPEYYRFQRELTISVLDLVALFPNYDIRTYPIPTKSQLTREIYTDPIISPGAQAGYTLQDVLREPHLMDFLNRLIIYTGEYRGIRHWAGHEVESSRTGMMTNIRFPLYGTAATAEPTRFITPSTFPGLNLFYRTLSAPIFRDEPGANIIIRYRTSLVEGVGFIQPNNGEQLYRVRGTLDSLDQLPLEGESSLTEYSHRLCHVRFAQSLRNAEPLDYARVPMFSWTHRSATPTNTIDPDVITQIPLVKAFNLHSGATVVRGPGFTGGDILRRTNAGNFGDMRVNITAPLSQRYRVRIRYASTANLQFHTSINGRAINQANFPATMNSGENLQSGSFRVAGFTTPFTFSDALSTFTIGAFSFSSNNEVYIDRIEFVPAEVTFATESDQDRAQKAVNALFTSSNQIGLKTDVTNYHIDQVSNLVECLSDEFCLDEKRELSEKVKHAKRLCDERNLLQDPNFRGINREPDRGWRGSTDITIQRGDDVFKENYVTLPGTFDECYPTYLYQKIDESKLKAYTRYELRGYIEDSQDLEIYLIRYNAKHETVNVPGTGSLWPLSAQSPIGKCGEPNRCATHLEWNPDLDCSCRDGEKCAHHSHHFSLDIDVGCTDLNEDLGVWVIFKIKTQDGHARLGNLEFLEEKPLVGEALARVKRAEKKWRDKREKLELETNIVYKEAKKSVDALFVNSQYDRLQADTNIAIIHAADKRVHSIREAYLPELSVIPGVNAAIFEELEGRIFTAYSLYDARNVIKNGDFNNGLSCWNVKGHVDVEEQNNHRSVLVVPEWEAEVSQEVRVCPGRGYILRVTAYKEGYGEGCVTIHEIEDNTDELKFSNCVEEEIYPNNTVTCNDYTATQEEYEGTYTSRNRGYDGAYESNSSVPADYASAYEEKAYTDGRRDNTCESNRGYGDYTPLPAGYVTKELEYFPETDKVWIEIGETEGTFIVDSVELLLMEE

SEQ ID NO: 194 - protein, 1167 aa, Bacillus thuringiensis
MERNNQDQCIPYNCLNNPEIEILDVENFNLELVSQVSVGLTRFLLESAVPGAGFALGLFDIIWGALGVDQWSLFLAQIEQLINERITTVERNRAIQTLSGLSSSYEVYIEALREWENNPDNPASQERVRTRFRTTDDALITAIPNLAIPDFEIATLSVYVQAANLHLSLLRDAVYFGERWGLTQVNIEDLYTRLTRNIHIYSDHCARWYNQGLNNIGATNTRYLEFQRELTLSVLDIVALFPNYDIRTYSIPTQSQLTREIYTDIIAAPNASNLIVGTQGLVRAPHLMDFLVRLNIYTGLARNIRHWAGHEVISRRTGGVDLNTIQSPLYGTAATTESPRLIIPFNEDSYLGGFIYRTLSSPIYVPPSGISSQRTSLVEGVGFQTPNNSILQYRQRGTLDSLEQVPLQEEGRPGGFGASHRLCHATFAQSPIGTNYYIRAPLFSWTHLSATLTNEVRVSRITQLPMVKAHTLHAGATVVRGPGFTGGDILRRTTSGSFGDMRITNFSSSSSRYRVRIRYASTTDLQFFLNVGGTPVNVADFPKTIDRGENLEYGSFRTAGFTTPFSFVSSTNNFTLGVQSVSSGNEIFVDRIEFVPADATFEAEYDLERAQEAVNALFTSTNQRGLKTDVTDYHIDQVSNLVDCLSDEFCLDEKRELSEKIKHAKRLSDERNLLQDSNFRGINRQPDRGWRGSTDITIQGGNDVFKENYVTLPGTFDECYPTYLYQKIDESKLKAFTRYQLRGYIEDSQDLEIYLIRYNAKHETVNVPGTGSLWPLSAQSPIGKCGEPNRCAPHLEWNPDLDCSCRDGEKCAHHSHHFSLDIDVGCTDLNEDLGVWVIFKIKTQDGHARLGNLEFLEEKPLVGEALARVKRAEKKWRDKREKLEWETNIVYKEAKESVDALFVNSQYDQLQADTNIAMIHAADKRVHSIREAYLPELSVIPGVNAAIFEELEGRIFTAFSLYDARNVIKNGDFNNGLSCWNVKGHVDVEEQNNQRSVLVVPEWEAEVSQEVRVCPGRGYILRVTAYKEGYGEGCVTIHEIENNTDELKFSNCVEEEIYPNNTVTCNDYTVNQEEYGGAYTSRNRGYNEAPSVPADYASVYEEKSYTDGRRENPCEFNRGYRDYTPLPVGYVTKELEYFPETDKVWIEIGETEGTFIVDSVELLLMEE

SEQ ID NO: 195 - protein, 1172 aa, Bacillus thuringiensis BTS02069AA
MEIINNQNQYVPYNCLSNPENEILDIESLSSRSREQVAEISLGLTRFLLESLLPGASFGFALFDIIWGVIGPDQWNLFLAQIEQLIDQRIEAHVRNQAISRLEGLGDSYEVYIESLREWEASPNNEALQQDVRNRFSNTDNALITAIPILREQGFEIPLLSVYVQAANLHLSLLRDAVYFGQRWGLDTVTVNNHYNRLINLINTYSDHCAQWFNRGLDNFGGVSARYLDFQREVTISVLDIVALFPNYDIRTYPISTQSQLTREIYTSPVAEPGASLNANLQNILREPHLMDFLTRLVIYTGVQSGIYHWAGHEISSRTTGNLSSNIQFPLYGTAASADRAFNMNIHHSETIYRTLSAPIYSVSGGISPNRTRVVEGVRFLIARDNNLDSLPFLYRKEGTLDSFTELPPEDESTPPYIGYSHRLCHARFARSPVILEPSNFARLPVFSWTHRSASPTNEVSPSRITQIPWVKAHTLASGASVIKGPGFTGGDIMTRNNINLGDLGTLRVTVTGRLPQSYYIRLRYASVANSSGVFRHLPQPSYGISFPRTMGTDEPLTSRSFALTTLFTPITLTRAQEEFNLTIPRGVYIDRIEFVPVDATFEAGYDLERAQKAVNALFTSTNQRGLKTDITDYHIDQVSNLVECLSDEFCLDEKRELSEKVKHAKRLSDGRNLLQDRNFISINGLLDRGWRGSTDITIQGSDDVFKENYVTLPGTFDECYPTYLYQKIDESKLKAYTRYQLRGYIEDSQDLEIYLIRYNAKHEIVNVPGTGSLWPLSVENSIGPCGESNRCAPHLEWNPNLDCSCRDGEKCAHHSHHFSLDIDVGCTDLNEDLGVWVIFKIKTQDGHARIGNLEFLEEKPLVGEALARVKRAEKKWRDKRKKLEFETNIVYKEAKESVDALFVNSQYDKLKADTNIAMIHAADKRVHRIREAYLPELSVIPGVNADIFEELEGRIFTAYSLYDARNVIKNGDFNNGLLCWNVKGHVDVEEQNNHRSVLVVPEWEAEVSQEVRVCPGRGYILRVTAYKEGYGEGCVTIHEIEDNTDELKFSNCVEEEVYPSNTVTCNDYTANQEEYEGTYTSRNQGYDEAYESNSSVPANYASVYEEKAYTDGRRENSCEFNRGYRDYTPLPAGYVTKELEYFPGTAKVWIEIGETEGTFIVDSVELLLMEE

SEQ ID NO: 196 - protein, 1155 aa, Bacillus thuringiensis morrisoni BF190
MEVNHQNECVPYNCLKNPKIEMLDIEGISSRSREQVAEISLGLTRFLLESLLPGASFGFGLFDIIWGVIGPDQWSLFLTQIEQLIDQRIEAHVRNQAISRLEGLGDSYEVYIESLREWEASPNNESLQQDVRNRFSNTDNALITAIPILREQGFEIPLLTVYVQAANLHLSLLRDAVYFGQRWGLDTATVNNHYNRLINLINTYSDHCAQWFNRGLDNFGVVTARYLDFQREVTISVLDIVALFPNYDIRTYPIQTLSQLTREIYTSPVAEPGASLNVDLRNILREPHLMDFLTRLVIYTGVQGGIYHWAGHEISSRTTGNLSSNIQFPLYGTSANADRPFNLAIHYSETIYRTLSAPIYSVSGGISPNRTRAVEGVRFLTARDNNLNSLPFLYRKEGSLDSFTELPPEDENEPPYIGYSHRLCHARFARSSVVLEPSNFARIPVFSWTHRSAGPTNEVSSSRITQIPWVKAHTLDSGAFVIKGPGFTGGDILTRPNLGTLGALRVTLTGQLPQTYNIRIRYASIANRGGTLIFSQPPSYGLTFPKTMDIDEPLTSRSFARTTLFTPITFTQAQAELNLTIQQGVYIDRIEFIPVNATFEAEYDLERAQEAVNALFTSSNQLGLKTDLTDYHIDQVSNLVDCLSDEFCIDEKRELSEKVKHAKRLSDERNLLQDSNFRGINRQPDRGWRGSTDITIQGGNDVFKENYVTLPGTFDECYPTYLYQKIDESKLKAYTRYQLRGYIEDSQDLEIYLIRYNAKHETVNVPGTGSLWPLSVESPIGKCGEPNRCVPQLEWNSNLDCSCRDGEKCAHHSHHFSLDIDVGCTDLNEDLGVWVIFKIKTQDGHARLGNLEFLEEKPLLGEALARVKRAEKKWRDKRETLQLETNIVYKEAKESVDALFANSQYNRLQADTNIAMIHAADKRVHRIREAYLPELSVIPGVNAGIFEELEGRIFTAFSLYDARNVIKNSDFNNGLSCWNVKGHVDIEEQNNHRSVLVVPEWEAEVSQKVHVCPGRGYILRVTAYKEGYGEGCVTIHEIEDHTDELKFRNCEEDEVYPNNTRTCNAYPADQEGYEGACTSRNRGYDEVYGNTPSLPADYAPIYEENAYTDGRRGNPCESSRGYGDYTPLPAGYETKELEYFPETDTVWPRNRYSVD

SEQ ID NO: 197 - protein, 140 aa, Bacillus thuringiensis JC291
QCVPYNCLSNPENEILDIESLSSRSREQVAEISLGLTRFLLESLLPGASFGFALFDIIWGVIGPDQWNLFLAQIEQLIDQRIEAHVRNQAISRLEGLGDSYEVYIESLREWEGSPNNEGLQQDVRNRFSNTDNALITGYL

SEQ ID NO: 198 - protein, 719 aa, Bacillus thuringiensis kurstaki
MKLKNQDKHQSFSSNAKVDKISTDSLKNETDIELQNINHEDCLKMSEYENVEPFVSASTIQTGIGIAGKILGTLGVPFAGQVASLYSFILGELWPKGKNQWEIFMEHVEEIINQKISTYARNKALTDLKGLGDALAVYHDSLESWVGNRNNTRARSVVKSQYIALELMFVQKLPSFAVSGEEVPLLPIYAQAANLHLLLLRDASIFGKEWGLSSSEISTFYNRQVERAGDYSYHCVKWYSTGLNNLRGTNAESWVRYNQFRRDMTLMVLDLVALFPSYDTQMYPIKTTAQLTREVYTDAIGTVHPHPSFTSTTWYNNNAPSFSAIEAAVVRNPHLLDFLEQVTIYSLLSRWSNTQYMNMWGGHKLEFRTIGGTLNISTQGSTNTSINPVTLPFTSRDVYRTESLAGLNLFLTQPVNGVPRVDFHWKFVTHPIASDNFYYPGYAGIGTQLQDSENELPPEATGQPNYESYSHRLSHIGLISASHVKALVYSWTHRSADRTNTIEPNSITQIPLVKAFNLSSGAAVVRGPGFTGGDILRRTNTGTFGDIRVNINPPFAQRYRVRIRYASTTDLQFHTSINGKAINQGNFSATMNRGEDLDYKTFRTVGFTTPFSFLDVQSTFTIGAWNFSSGNEVYIDRIEFVPVEVTYEAEYDFEKAQEKVTALFTSTNPRGLKTDVKDYHIDQVSNLVESLSDEFYLDEKRELFEIVKYAKQLHIERNM

SEQ ID NO: 199 - protein, 719 aa, Bacillus thuringiensis thuringiensis
MKLKNQDKHQSFSSNAKVDKISTDSLKNETDIELQNINHEDCLKMSEYENVEPFVSASTIQTGIGIAGKILGTLGVPFAGQVASLYSFILGELWPKGKNQWEIFMEHVEEIINQKISTYARNKALTDLKGLGDALAVYHDSLESWVGNRNNTRARSVVKSQYIALELMFVQKLPSFAVSGEEVPLLPIYAQAANLHLLLLRDASIFGKEWGLSSSEISTFYNRQVERAGDYSDHCVKWYSTGLNNLRGTNAESWVRYNQFRRDMTLMVLDLVALFPSYDTQMYPIKTTAQLTREVYTDAIGTVHPHPSFTSTTWYNNNAPSFSAIEAAVVRNPHLLDFLEQVTIYSLLSRWSNTQYMNMWGGHKLEFRTIGGTLNISTQGSTNTSINPVTLPFTSRDVYRTESLAGLNLFLTQPVNGVPRVDFHWKFVTHPIASDNFYYPGYAGIGTQLQDSENELPPEATGQPNYESYSHRLSHIGLISASHVKALVYSWTHRSADRTNTIEPNSITQIPLVKAFNLSSGAAVVRGPGFTGGDILRRTNTGTFGDIRVNINPPFAQRYRVRIRYASTTDLQFHTSINGKAINQGNFSATMNRGEDLDYKTFRTVGFTTPFSFLDVQSTFTIGAWNFSSGNEVYIDRIEFVPVEVTYEAEYDFEKAQEKVTALFTSTNPRGLKTDVKDYHIDQVSNLVESLSDEFYLDEKRELFEIVKYAKQLHIERNM

SEQ ID NO: 200 - protein, 719 aa, Bacillus thuringiensis kurstaki BNS3
MKLKNQDKHQSFSSNAKVDKISTDSLKNETDIELQNINHEDCLKMSEYENVEPFVSASTIQTGIGIAGKILGTLGVPFAGQVASLYSFILGELWPKGKNQWEIFMEHVEEIINQKISTYARNKALTDLKGLGDALAVYHDSLESWVGNRNNTRARSVVKSQYIALELMFVQKLPSFAVSGEEVPLLPIYAQAANLHLLLLRDASIFGKEWGLSSSEISTFYNRQVERAGDYSDHCVKWYSTGLNNLRGTNAESWVRYNQFRRDMTLMVLDLVALFPSYDTQMYPIKTTAQLTREVYTDAIGTVHPHPSFTSTTWYNNNAPSFSAIEAAVVRNPHLLDFLEQVTIYSLLSRWSNTQYMNMWGGHKLEFRTIGGTLNISTQGSTNTSINPVTLPFTSRDVYRTESLAGLNLFLTQPVNGVPRVDFHWKFVTHPIASDNFYYPGYAGIGTQLQDSENELPPEATGQPNYESYSHRLSHIGLISASHVKALVYSWTHRSADRTNTIEPNSITQIPLVKAFNLSSGAAVVRGPGFTGGDILRRTNTGTFGDIRVNINPPFAQRYRVRIRYASTTDLQFHTSINGKAINQGNFSATMNRGEDLDYKTFRTVGFTTPFSFLDVQSTFTIGAWNFSSGNEVYIDRIEFVPVEVTYEAEYDFEKAQEKVTALFTSTNPRGLKTDVKDYHIDQVSNLVESLSDEFYLDEKRELFEIVKYANELHIERNM

SEQ ID NO: 201 - protein, 719 aa, Bacillus thuringiensis
MKLKNQDKHQSFSSNAKVDKISTDSLKNETDIELQNINHEDCLKMSEYENVEPFVSASTIQTGIGIAGKILGTLGVPFAGQVASLYSFILGELWPKGKNQWEIFMEHVEEIINQKISTYARNKALTDLKGLGDALAVYHDSLESWVGNRNNTRARSVVRSQYIALELMFVQKLPSFAVSGEEVPLLPIYAQAANLHLLLLRDASIFGKEWGLSSSEISTFYNRQVERAGDYSDHCVKWYSTGLNNLRGTNAESWVRYNQFRRDMTLMVLDLVALFPSYDTQMYPIKTTAQLTREVYTDAIGTVHPHPSFTSTTWYNNNAPSFSAIEAAVVRNPHLLDFLEQVTIYSLLSRWSNTQYMNMWGGHKLEFRTIGGTLNISTQGSTNTSINPVTLPFTSRDVYRTESLAGLNLFLTQPVNGVPRVDFHWKFVTHPIASDNFYYPGYAGIGTQLQDSENELPPEATGQPNYESYSHRLSHIGLISASHVKALVYSWTHRSADRTNTIEPNSITQIPLVKAFNLSSGAAVVRGPGFTGGDILRRTNTGTFGDIRVNINPPFAQRYRVRIRYASTTDLQFHTSINGKAINQGNFSATMNRGEDLDYKTFRTVGFTTPFSFLDVQSTFTIGAWNFSSGNEVYIDRIEFVPVEVTYEAEYDFEKAQEKVTALFTSTNPRGLKTDVKDYHIDQVSNLVESLSDEFYLDEKRELFEIVKYAKQLHIERNM

SEQ ID NO: 202 - protein, 719 aa, Bacillus thuringiensis
MKLKNQDKHQSFSSNAKVDKISTDSLKNETDIELQNINHEDCLKMSEYENVEPFVSASTIQTGIGIAGKILGTLGVPFAGQVASLYSFILGELWPKGKNQWEIFMEHVEEIINQKISTYARNKALTDLKGLGDALAVYHDSLESWVGNRNNTRARSVVKSQYIALELMFVQKLPSFAVSGEEVPLLPIYAQAANLHLLLLRDASIFGKEWGLSSSEISTFYNRQVERAGDYSDHCVKWYSTGLNNLRGTNAESWVRYNQFRRDMTLMVLDLVALFPSYDTQMYPIKTTAQLTREVYTDAIGTVHPHPSFTSTTWYNNNAPSFSAIEAAVVRNPHLLDFLEQVTIYSLLSRWSNTQYMNMWGGHKLEFRTIGGTLNISTQGSTNTSINPVTLPFTSRDVYRTESLAGLNLFLTQPVNGVPRVDFHWKFVTHPIASDNFYYPGYAGIGTQLQDSENELPPEATGQPNYESYSHRLSHIGLISASHVKALVYSWTHRSADRTNTIEPNSITQIPLVNAFNLSSGAAVVRGPGFTGGDILRRTNTGTFGDIRVNINPPFAQRYRVRIRYASTTDLQFHTSISGKAINQGNFSATMNRGEDLDYKTSRTVGFTTPFSFLDVQSTFTIGAWNFSSGNEVYIDRIEFVPVEVTYEAEYDFEKAQEKVTALFTSTNPRGLKTDVKDYHIDQVSNLVESLSDEFYLDEKRELFEIVKYAKQLHIERNM

SEQ ID NO: 203 - protein, 719 aa, Bacillus thuringiensis; identical to SEQ ID NO: 199

SEQ ID NO: 204 - protein, 719 aa, Bacillus thuringiensis E-1B
MKLKNQDKHQSFSSNAKVDKISTDSLKNETDIELQNINHEDCLKMSEYENVEPFVSASTIQTGIGIAGKILGTLGVPFAGQVASLYSFILGELWPKGKNQWEIFMEHVEEIINQKISTYARNKALTDLKGLGDALAVYHDSLESWVGNRNNTRARSVVKSQYIALELMVVQKLPSFAVSGEEVPLLPIYAQAANLHLLLLRDASIFGKEWGLSSSEISTFYNRQVERAGDYSDHCVKWYSTGLNNLRGTNAESWVRYNQFRRDMTLMVLDLVALFPSYDTQMYPIKTTAQLTREVYTDAIGTVHPHPSFTSTTWYNNNAPSFSAIEAAVVRNPHLLDFLEQVTIYSLLSRWSNTQYMNMWGGHKLEFRTIGGTLNISTQGSTNTSINPVTLPFTSRDVYRTESLAGLNLFLTQPVNGVPRVDFHWKFVTHPIASDNFYYPGYAGIGTQLQDSENELPPEATGQPNYESYSHRLSHIGLISASHVKALVYSWTHRSADRTNTIEPNSITQIPLVKAFNLSSGAAVVRGPGFTGGDILRRTNTGTFGDIRVNINPPFAQRYRVRIRYASTTDLQFHTSINGKAINQGNFSATMNRGEDLDYKTFRTVGFTTPFSFLDVQSTFTIGAWNFSSGNEVYIDRIEFVPVEVTYEAEYVNEKAQEKVTALFTSTNPRGLKTDVKDYHIDQVSNLVESLSDEFYLDEKRELFEIVKYANELHIERNM

SEQ ID NO: 205 - protein, 719 aa, Bacillus thuringiensis E-1A
MKLKNQDKHQSFSSNAKLDKISTDSLKNETDIELQNINHEDCLKMSEYENVEPFVSASTIQTGIGIAGKILGTLGVPFAGQVASLYSFILGELWPKGKNQWEIFMEHVEEIINQKISTYARNKALTDLKGLGDALAVYHDSLESWVGNRNNTRARSVVKSQYIALELMFVQKLPSFAVSGEEVPLLPIYAQAANLHLLLLRDASIFGKEWGLSSSEISTFYNRQVERAGDYSDHCVKWYSTGLNNLRGTNAESWVRYNQFRRDMTLMVLDLVALFPSYDTQMYPIKTTAQLTREVYTDAIGTVHPHPSFTSTTWYNNNAPSFSAIEAAVVRNPHLLDFLEQVTIYSLLSRWSNTQYMNMWGGHKLEFRTIGGTLNISTQGSTNTSINPVTLPFTSRDVYRTESLAGLNLFLTQPVNGVPRVDFHWKFVTHPIASDNFYYPGYAGIGTQLQDSENELPPEATGQPNYESYSHRLSHIGLISASHVKALVYSWTHRSADRTNTIEPNSITQIPLVKAFNLSSGAAVVRGPGFTGGDILRRTNTGTFGDIRVNINPPFAQRYRVRIRYASTTDLQFHTSINGKAINQGNFSATMNRGEDLDYKTFRTVGFTTPFSFLDVQSTFTIGAWNFSSGNEVYIDRIEFVPVEVTYEAEYDFEKAQEKVTALFTSTNPRGLKTDVKDYHIDQVSNLVESLSDEFYLDEKRELFEIVKYGKGLHIERNM

SEQ ID NO: 206 - protein, 719 aa, Bacillus thuringiensis MX2
MKLKNPDKHQSFSSNAKVDKISTDSLKNETDIELQNINHEDCLKMSEYENVEPFVSASTIQTGIGIAGKILGTLGVPFAGQVASLYSFILGELWPKGKNQWEIFMEHVEEIINQKISTYARNKALTDLKGLGDALAVYHDSLESWVGNRNNTRARSVVKSQYIALELMFVQKLPSFAVSGEEVPLLPIYAQAANLHLLLLRDASIFGKEWGLSSSEISTFYNRQVERAGDYSDHCVKWYSTGLNNLRGTNAESWVRYNQFRRDMTLMVLDLVALFPSYDTQMYPIKTTAQLTREVYTDAIGTVHPHPSFTSTTWYNNNAPSFSAIEAAVVRNPHLLDFLEQVTIYSLLSRWSNTQYMNMWGGHKLEFRTIGGTLNISTQGSTNTSINPVTLPFTSRDVYRTESLAGLNLFLTQPVNGVPRVDFHWKFVTHPIASDNFYYPGYAGIGTQLQDSENELPPEATGQPNYESYSHRLSHIGLISASHVKALVYSWTHRSADRTNTIEPNSITQIPLVKAFNLSSGAAVVRGPGFTGGDILRRTNTGTFGDIRVNINPPFAQRYRVRIRYASTTDLQFHTSINGKAINQGNFSATMNRGEDLDYKTFRTVGFTTPFSFLDVQSTFTIGAWNFSSGNEVYIDRIEFVPVEVTYEAVYDFEKAQEKVTALFTSTNPRGLKTDVKDHHIDQVSNLVESLSDEFYLDEKRELFEIVKYAKQLHIERNM

SEQ ID NO: 207 - protein, 705 aa, Bacillus thuringiensis MX9
MKLKNPDKHQSLSSNAKVDKIATDSLKNETDIELKNMNNEDYLRMSEHESIDPFVSASTIQTGIGIAGKILGTLGVPFAGQIASLYSFILGELWPKGKSQWEIFMEHVEEIINQKILTYARNKALSDLRGLGDALAVYHESLESWVKNRNNTRARSVVKNQYIALELMFVQKLPSFAVSGEEVPLLPIYAQAANLHLLLLRDASIFGKEWGLSASEISTFYNRQVERTRDYSDHCVKWYNTGLNNLRGTNAKSWVRYNQFRKDMTLMVLDLVALFPSYDTLVYPIKTTSQLTREVYTDAIGTVHPNQAFASTTWYNNNAPSFSAIEAAVIRSPHLLDFLEKVTIYSLLSRWSNTQYMNMWGGHRLESRPIGGALNTSTQGSTNTSINPVTLQFTSRDVYRTESWAGLNLFLTQPVNGVPRVDFHWKFPTLPIASDNFYYLGYAGVGTQLQDSENELPPETTGQPNYESYSHRLSHIGLISASHVKALVYSWTHRSADRTNTIEPNSITQIPLVKAFNLPSGAAVVRGPGFTGGDILRRTNTGTFGDIRVNINPPFAQRYRVRIRYASTTDVQFHTSINGKAINQGNFSATMNRGEDLDYKTFRTVGFTTPFSLSDVQSTFTIGAWNFSSGNEVYIDRIEFVPVEVTYEAEHDFEKAQEEVTALFTSTNPGGLKTNVTEYHIDQVSNLVESLSMNSISMKRENYSR

SEQ ID NO: 208 - protein, 719 aa, Bacillus thuringiensis kurstaki; identical to SEQ ID NO: 199

SEQ ID NO: 209 - protein, 719 aa, Bacillus thuringiensis kurstaki HD1
MKLKNQDKHQSFSSNAKVDKISTDSLKNETDIELQNINHEDCLKMSEYENVEPFVSASTIQTGIGIAGKILGTLGVPFAGQVASLYSFILGELWPKGKNQWEIFMEHVEEIINQKISTYARNKALTDLKGLGDALAVYHDSLESWVGNRNNTRARSVVKSQYIALELMFVQKLPSFAVSGEEVPLLPIYAQAANLHLLLLRDASIFGKEWGLSSSEISTFYNRQVERAGDYSYHCVKWYSTGLNNLRGTNAESWVRYNQFRRDMTLMVLDLVALFPSYDTQMYPIKTTAQLTREVYTDAIGTVHPHPSFTSTTWYNNNAPSFSAIEAAVVRNPHLLDFLEQVTIYSLLSRWSNTQYMNMWGGHKLEFRTIGGTLNISTQGSTNTSINPVTLPFTSRDVYRTESLAGLNLFLTQPVNGVPRVDFHWKFVTHPIASDNFYYPGYAGIGTQLQDSENELPPEATGQPNYESYSHRLSHIGLISASHVKALVYSWTHRSADRTNTIEPNSITQIPLVKAFNLSSGAAVVRGPGFTGGDILRRTNTGTFGDIRVNINPPFAQRYRVRIRYASTTDLQFHTSINGKAINQGNFSATMNRGEDLDYKTFRTVGFTTPFSFLDVQSTFTIGAWNFSSGNEVYIDRIEFVPVEVTYEAEYDFEKAQEKVTALFTSTNPRGLKTDVKDYHIDQVSNLVESLSDEFYLDEKRELFEIVKYANELHIERNM

SEQ ID NO: 210 - protein, 719 aa, Bacillus thuringiensis AB88
MKLKNQDKHQSFSSNAKVDKISTDSLKNETDIELQNINHEDCLKMSEYENVEPFVSASTIQTGIGIAGKILGTLGVPFAGQVASLYSFILGELWPKGKNQWEIFMEHVEEIINQKISTYARNKALTDLKGLGDALAVYHDSLESWVGNRNNTRARSVVKSQYIALELMFVQKLPSFAVSGEEVPLLPIYAQAANLHLLLLRDASIFGKEWGLSSSEISTFYNRQVERAGDYSDHCVKWYSTGLNNLRGTNAESWVRYNQFRRDMTLMVLDLVALFPSYDTQMYPIKTTAQLTREVYTDAIGTVHPHPSFTSTTWYNNNAPSFSAIEAAVVRNPHLLDFLEQVTIYSLLSRWSNTQYMNMWGGHKLEFRTIGGTLNISTQGSTNTSINPVTLPFTSRDVYRTESLAGLNLFLTQPVNGVPRVDFHWKFVTHPIASDNFYYPGYVGIGTQLQDSENELPPEATGQPNYESYSHRLSHIGLISASHVKALVYSWTHRSADRTNTIEPNSITQIPLVKAFNLSSGAAVVRGPGFTGGDILRRTNTGTFGDIRVNINPPFAQRYRVRIRYASTTDLQFHTSINGKAINQGNFSATMNRGEDLDYKTFRTVGFTTPFSFLDVQSTFTIGAWNFSSGNEVYIDRIEFVPVEVTYEAEYDFEKAQEKVTALFTSTNPRGLKTDVKDYHIDQVSNLVESLSDEFYLDEKRELFEIVKYAKQLHIERNM

SEQ ID NO: 211 - protein, 719 aa, Bacillus thuringiensis 61
MKLKNQDKHQSFSSNAKVDKISTDSLKNETDIELQNINHEDCLKMSEYENVEPFVSASTIQTGIGIAGKILGTLGVPFAGQVASLYSFILGELWPKGKNQWEIFMEHVEEIINQKISTYARNKALTDLKGLGDALAVYHDSLESWVGNRNNTRARSVVRSQYIALELMFVQKLPSFAVSGEEVPLLPIYAQAANLHLLLLRDASIFGKEWGLSSSEISTFYNRQVERAGDYSDHCVKWYSTGLNNLRGTNAESWVRYNQFRRDMTLMVLDLVALFPSYDTQMYPIKTTAQLTREVYTDAIGTVHPHPSFTSTTWYNNNAPSFSAIEAAVVRNPHLLDFLEQVTIYSLLSRWSNTQYMNMWGGHKLEFRTIGGTLNISTQGSTNTSINPVTLPFTSRDVYRTESLAGLNLFLTQPVNGVPRVDFHWKFVTHPIASDNFYYPGYAGIGTQLQDSENELPPEATGQPNYESYSHRLSHIGLISASHVKALVYSWTHRSADRTNTIEPNSITQIPLVKAFNLSSGAAVVRGPGFTGGDILRRTNTGTFGDIRVNINPPFAQRYRVRIRYASTTDLQFHTSINGKAINQGNFSATMNRGEDLDYKTFRTVGFTTPFSFLDVQSTFTIGAWNFSSGNEVYIDRIEFVPVEVTYEAEYDFEKAQEKVTALFTSTNPRGLKTDVKDYHIDQVSNLVESLSDEFYLDEKRELFEIVKYANELHIERNM

SEQ ID NO: 212 - protein, 719 aa, Bacillus thuringiensis kurstaki S101
MKLKNQDKHQSFSSNAKVDKISTDSLKNETDIELQNINHEDCLKMSEYENVEPFVSASTIQTGIGIAGKILGTLGVPFAGQVASLYSFILGELWPKGKNQWEIFMEHVEEIINQKISTYARNKALTDLKGLGDALAVYHDSLESWVGNRNNTRARSVVKSQYIALELMFVQKLPSFAVSGEEVPLLPIYAQAANLHLLLLRDASIFGKEWGLSSSEISTFYNRQVERAGDYSDHCVKWYSTGLNNLRGTNAESWVRYNQFRRDMTLMVLDLVALFPSYDTQMYPIKTTAQLTREVYTDAIGTVHPHPSFTSTTWYNNNAPSFSAIEAAVVRNPHLLDFLEQVTIYSLLSRWSNTQYMNMWGGHKLEFRTIGGTLNISTQGSTNTSINPVTLPFTSRDVYRTESLAGLNLFLTQPVNGVPRVDFHWKFVTHPIASDNFYYPGYAGIGTQLQDSENELPPEATGQPNYESYSHRLSHIGLISASHVKALVYSWTHRSADRTNTIEPNSITQIPLVKAFNLSSGAAVVRGPGFTGGDILRRTNTGTFGDIRVNIKPPFAQRYRVRIRYASTTDLQFHTSINGKAINQGNFSATMNRGEDLDYKTFRTVGFTTPFSFLDVQSTFTIGAWNFSSGNEVYIDRIEFVPVEVTYEAEYDFEKAQEKVTALFTSTNPRGLKTDVKDYHIDQVSNLVESLSDEFYLDEKRELFEIVKYAKQLHIERNM

SEQ ID NO: 213 - protein, 719 aa, Bacillus thuringiensis
MKLKNPDKHQSFSSNAKVDKISTDSLKNETDIELQNINHEDCLKISEYENVEPFVSASTIQTGISIAGKILGTLGVPFAGQVASLYSFILGELWPKGKNQWEIFMEHVEEIINQKISTYARNKALTDLKGLGDALAVYHESLESWVGNRKNTRARSVVKSQYIALELMFVQKLPSFAVSGEEVPLLPIYAQAANLHLLLLRDASIFGKEWGLSSSEISTFYNRQVERAGDYSDHCVKWYSTGLNNLRGTNAESWVRYNQFRKDMTLMVLDLVALFPSYDTLVYPIKTTSQLTREVYTDAIGTVHPNASFASTTWYNNNAPSFSTIESAVVRNPHLLDFLEQVTIYSLLSRWSNTQYMNMWGGHRLEFRTIGGMLNTSTQGSTNTSINPVTLPFTSRDVYRTESLAGLNLFLTQPVNGVPRVDFHWKFVTHPIASDNFYYPGYAGIGTQLQDSENELPPETTGQPNYESYSHRLSHIGLISASHVKALVYSWTHRSADRTNTIEPNSITQIPLVKAFNLSSGAAVVRGPGFTGGDILRRTNTGTFGDIRVNINPPFAQRYRVRIRYASTTDIQFHTSINGKAINQGNFSATMNRGEDLDYKTFRTVGFTTPFSFSDVQSTFTIGAWNFSSGNEVYIDRIEFVPVEVTYEAEYDFEKAQEKVTALFTSTNPGGLKTNVTEYHIDQVSNLVESLSNEFYLDEKRELFEIVKYAKQLHTGRNM

SEQ ID NO: 214 - protein, 719 aa, Bacillus thuringiensis
MKLKNQDKHQSFSSNAKVDKISTDSLKNETDIELQNINHEDCLKMSEYENVEPFVSASTIQTGIGIAGKILGTLGVPFAGQVASLYSFILGELWPKGKNQWEIFMEHVEEIINQKISTYARNKALTDLKGLGDALAVYHDSLESWVGNRNNTRARSVVKSQYIALELMFVQKLPSFAVSGEEVPLLPIYAQAANLHLLLLRDASIFGKEWGLSSSEISTFYNRQVERAGDYSDHCVKWYSTGLNNLRGTNAESWVRYNQFRRDMTLMVLDLVALFPSYDTQMYPIKTTAQLTREVYTDAIGTVHPHPSFTSTTWYNNNAPSFSAIEAAVVRNPHLLDFLEQVTIYSLLSRWSNTQYMNMWGGHKLEFRTIGGTLNISTQGSTNTSINPVTLPFTSRDVYRTESLAGLNLFLTHPVNGVPRVDFHWKFVTHPIASDNFYYPGYAGIGTQLQDSENELPPEATGQPNYESYSHRLSHIGLISASHVKALVYSWTHRSADRTNTIEPNSITQIPLVKAFNLSSGAAVVRGPGFTGGDILRRTNTGTFGDIRVNINPPFAQRYRVRIRYASTTDLQFHTSINGKAINQGNFSATMNRGEDLDYKTFRTVGFTTPFSFLDVQSTFTIGAWNFSSGNEVYIDRIEFVPVEVTYEAEYDFEKAQEKVTALFTSTNPRGLKTDVKDYHIDQVSNLVESLSDEFYLDEKRELFEIVKYAKQLHIERNM

SEQ ID NO: 215 - protein, 720 aa, Bacillus thuringiensis Ly30
MKLKNPDKHQSFSSNAKVDKISTDSLKNETDIELQNINHEDCLKMSEYENVEPFVSASTIQTGIGIAGKILGTLGVPFAGQVASLYSFILGELWPKGKNQWEIFMEHVEEIINQKISTYARNKALTDLKGLGDALAVYHDSLESWVGNRNNTRARSVVKSQYIALELMFVQKLPSFAVSGEEVPLLPIYAQAANLHLLLLRDASIFGKEWGLSSSEISTFYNRQVERAGDYSDHCVKWYSTGLNNLRGTNAESWVRYNQFRRDMTLMVLDLVALFPSYDTQMYPIKTTAQLTREVYTDAIGTVHPHPSFTSTTWYNNNAPSFSAIEAAVVRNPHLLDFLEQVTIYSLLSRWSNTQYMNMWGGHKLEFRTIGGTLNISTQGSTNTSINPVTLPFTSRDVYRTESLAGLNLFLTQPVNGVPRVDFHWKFVTHPIASDNFYYPGYAGIGTQLQDSENELPPEATGQPNYESYSHRLSHIGLISASHVKALVYSWTHRSADRTNTIEPNSITQIPLVKAFNLSSGAAVVRGPGFTGGDILRRTNTGTFGDIRVNINPPFAQRYRVRIRYASTTDLQFHTSINGKAINQGNFSATMNRGEDLDYKTFRTVGFTTPFSFLDVQSTFTIGAWNFSSGNEVYIDRIEFVPVEVTYEAEYDFEKAQEKVTALFTSTNPRGLKTDVKDYHIDQVSNLVESLSDEFYLDEKRELFEIVKYAKQLHIERNMP

SEQ ID NO: 216 - protein, 719 aa, Bacillus thuringiensis entomocidus BP465
MKLKNPDKHQSLSSNAKVDKIATDSLKNETDIELKNMNNEDYLRMSEHESIDPFVSASTIQTGIGIAGKILGTLGVPFAGQIASLYSFILGELWPKGKSQWEIFMEHVEEIINQKILTYARNKALSDLRGLGDALAVYHESLESWVENRNNTRARSVVKNQYIALELMFVQKLPSFAVSGEEVPLLPIYAQAANLHLLLLRDASIFGKEWGLSASEISTFYNRQVERTRDYSDHCIKWYNTGLNNLRGTNAKSWVRYNQFRKDMTLMVLDLVALFPSYDTLVYPIKTTSQLTREVYTDAIGTVHPNQAFASTTWYNNNAPSFSAIEAAVIRSPHLLDFLEKVTIYSLLSRWSNTQYMNMWGGHRLESRPIGGALNTSTQGSTNTSINPVTLQFTSRDVYRTESLAGLNLFLTQPVNGVPRVDFHWKFPTLPIASDNFYYLGYAGVGTQLQDSENELPPETTGQPNYESYSHRLSHIGLISASHVKALVYSWTHRSADRTNTIEPNSITQIPLVKAFNLSSGAAVVRGPGFTGGDILRRTNTGTFGDIRVNINPPFAQRYRVRIRYASTTDLQFHTSINGKAINQGNFSATMNRGEDLDYKTFRTIGFTTPFSFSDVQSTFTIGAWNFSSGNEVYIDRIEFVPVEVTYEAEYDFEKAQEKVTALFTSTNPRGLKTDVKDYHIDQVSNLVESLSDEFYLDEKRELFEIVKYAKQIHIERNM

SEQ ID NO: 217 - protein, 719 aa, Bacillus thuringiensis PP61
MKLKNPDKHQSLSSNAKVDKIATDSLKNETDIELKNMNNEDYLRMSEHESIDPFVRASTIQTGIGIAGKILGTLGVPFAGQIASLYSFILGELWPKGKSQWEIFMEHVEEIINQKILTYARNKAPSDLRGLGDALAVYHESLESWVENRNNTRARSVVKNQYIALELMFVQKLPSFAVSGEEVPLLPIYAQAANLHLLLLRDASIFGKEWGLSASEISTFYNRQVERTRDYSDHCIKWYNTGLNNLRGTNAKSWVRYNQFRKDMTLMVLDLVALFPSYDTLVYPIKTTSQLTREVYTDAIGTVHPNQAFASTTWYNNNAPSFSAIEAAVIRSPHLLDFLEKVTIYSLLSRWSNTQYMNMWGGHRLESRPIGGALNTSTQGSTNTSINPVTLQFTSRDVYRTESWAGLNLFLTQPVNGVPRVDFHWKFPTLPIASDNFYYLGYAGVGTQLQDSENELPPETTGQPNYESYSHRLSHIGLISASHVKALVYSWTHRSADRTNTIEPNSITQIPLVKAFNLSSGAAVVRGPGFTGGDILRRTNTGTFGDIRVNINPPFAQRYRVRIRYASTTDLQFHTSINGKAINQGKFSATMNRGEDLDYKTFRTVGFTTPFGFSDVQSTFTIGAWNFSSGNEVYIDRIEFVPVEVTYEAEYDFEKAQEKVTALFTSTNPRGLKTDVKDYHIDQVSNLVESLSDEFYLDEKRELFEIVKYAKQIHIERNM

SEQ ID NO: 218 - protein, 719 aa, Bacillus thuringiensis GS8
MKLKNQDKHQSLSSNAKVDKIATDSLKNETDIELKNMNNEDYLRMSEHESIDPFVSASTIQTGIGIAGKILGTLGVPFAGQIASLYSFILGELWPKGKSQWEIFMEHVEEIINQKILTYARNKALSDLRGLGDALAVYHESLESWVENRNNTRARSVVKNQYIALELMFVQKLPSFAVSGEEVPLLPIYAQAANLHLLLLRDASIFGKEWGLSASEISTFYNRQVERTRDYSDHCIKWYNTGLNNLRGTNAKSWVRYNQFRKDMTLMVLDLVALFPSYDTLVYPIKTTSQLTREVYTDAIGTVHPNQAFASTTWYNNNAPSFSAIEAAVIRSPHLLDFLEKVTIYSLLSRWSNTQYMNMWGGHRLESRPIGGALNTSTQGSTNTSINPVTLQFTSRDVYRTESWAGLNLFLTQPVNGVPRVDFHWKFPTLPIASDNFYYLGYAGVGTQLQDSENELPPETTGQPNYESYSHRLSHIGLISASHVKALVYSWTHRSADRTNTIEPNSITQIPLVKAFNLSSGAAVVRGPGFTGGDILRRTNTGTFGDIRVNINPPFAQRYRVRIRYASTTDLQFHTSINGKAINQGNFSATMNRGEDLDYKTFRTVGFTTPFSFSDVQSTFTIGAWNFSSGNEVYIDRIEFVPVEVTYEAEYDFEKAQEKVTALFTSTNPRGLKTDVKDYHIDQVSNLVESLSDEFYLDEKRELFEIVKYAKQIHIERNM

SEQ ID NO: 219 - protein, 719 aa, Bacillus thuringiensis BF-4
MKLKNPDKHQSLSSNAKVDKIATDSLKNETDIELKNINHEDFLRMSEHESIDPFVSASTIQTGIGIAGKILGTLGVPFAGQIASLYSFILGELWPKGKSQWEIFMEHVEELIDQKISTYARNIALADLKGLGDALAVYHESLESWIKNRNNARARSVVKNQYIALELMFVQKLPSFAVSGEEVPLLPIYAQAANLHLLLLRDASIFGKEWGLSASEISTFYNRQVERTRDYSDHCIKWYNTGLNNLRGTNAKSWVRYNQFRKDMTLMVLDLVALFPSYDTLVYPIKTTSQLTREVYTDAIGTVHPNQAFASTTWYNNNAPSFSAIEAAVIRSPHLLDFLEKVTIYSLLSRWSNTQYMNMWGGHRLESRPIGGALNTSTQGSTNTSINPVTLQFTSRDVYRTESWAGLNLFLTQPVNGVPRVDFHWKFPTLPIASDNFYYLGYAGVGTQLQDSENELPPETTGQPNYESYSHRLSHIGLISASHVKALVYSWTHRSADRTNTIEPNSITQIPLVKAFNLSSGAAVVRGPGFTGGDILRRTNTGTFGDIRVNINPPFAQRYRVRIRYASTTDLQFHTSINGKAINQGNFSATMNRGEDLDYKTFRTVGFTTPFSFSDVQSTFTIGAWNFSSGNEVYIDRIEFVPVEVTYEAEYDFEKAQEKVTALFTSTNPRGLKTDVKDYHIDQVSNLVESLSDEFYLDEKRELFEIVKYAKQIHIERNM

SEQ ID NO: 220 - protein, 702 aa, Bacillus thuringiensis LB52
MKLKNPDKHQSLSSNAKVDKIATDSLKNETDIELKNMNNEDYLRMSEHESIDPFVSASTIQTGIGIAGKILGTLGVPFAGQIASLYSFILGELWPKGKSQWEIFMEHVEEIINQKILTYARNKALSDLRGLGDALAVYHESLESWVKNRNNTRARSVVKNQYIALELMFVQKLPSFAVSGEEVPLLPIYAQAANLHLLLLRDASIFGKEWGLSASEISTFYNRQVERTRDYSDHCVKWYNTGLNNLRGTNAKSWVRYNQFRKDMTLMVLDLVALFPSYDTLVYPIKTTSQLTREVYTDAIGTVHPNQAFASTTWYNNNAPSFSAIEAAVIRSPHLLDFLEKVTIYSLLSRWSNTQYMNMWGGHRLESRPIGGALNTSTQGSTNTSINPVTLQFTSRDVYRTESWAGLNLFLTQPVNGVPRVDFHWKFPTLPIASDNFYYLGYAGVGTQLQDSENELPPETTGQPNYESYSHRLSHIGLISASHVKALVYSWTHRSADRTNTIEPNSITQIPLVKAFNLPSGAAVVRGPGFTGGDILRRTNTGTFGDIRVNINPPFAQRYRVRIRYASTTDVQFHTSINGKAINQGNFSATMNRGEDLDYKTFRTVGFTTPFSLSDVQSTFTIGAWNFSSGNEVYIDRIEFVPVEVTYEAEHDFEKAQEEVTALFTSTNPGGLKTNVTEYHIDQVSNLVESLSMNSISMKREN

SEQ ID NO: 221 - protein, 719 aa, Bacillus thuringiensis C18
MKLKNPDKHQTLSSNAKVDKIATDSLKNETDIELKNMNNEDYLRMSEHESIDPFVSASTIQTGIGIAGKILGTLGVPFPGQIASLYSFILGELWPKGKSQWEIFMEHVEAIINRKISTYARNKALTDLKGLGDALAVYHESLESWVGNRNNTRARSVVKNQYIALELMFVQKLPSFAVSGEEVPLLPIYAQAANLHLLLLRDASIFEKNGGLSASEISTFYNRQVERTRDYSYHCVKWNNTGLNNLRATNGQSWVRYNQFRKDIELMVLDLVRVFPSYDTLVYPIKTTSQLTREVYTDAIGTVDPNQALRSTTWYNNNAPSFSAIEAAVIRSPHLLDFLEKVTIYSLLSRWSNTQYMNMWGGHRLESRPIGGALNTSTQGSTNTSINPVTLQFTSRDFYRTESWAGLNLFLTQPVNGVPRVDFHWKFPTLPIASDNFYYLGYAGVGTQLQDSENELPPETTGQPNYESYSHRLSHIGLISGSHVKALVYSWTHRSADRTNTIEPNSITQIPLVKAFNLSSGAAVVRGPGFTGGHILRRTKSGTFGHIRVNINPPFAQRYRVRMSYASTTDLQFHTSINGKAINQGNFSATMNRGEDLDYKTFRTVGFTTPFSFSDVQSTFTIGAWNFSSGNEVYIGRIEFVPVEVTYEAEYDFEKAQEKVTALFTSTNPRGLKTDVKDYHIDQVSNLVESLSDELYLDEKRELFEIVKYAKQIHIERNM

SEQ ID NO: 222 - protein, 719 aa, Bacillus thuringiensis
MKSKNQNMYRSFSSNATVDKSFTDPLEHNTNMELQNSNHEDCLKMSEYESVEPFVSVSTIQTGIGIAGKILGNLGVPFAGQVASLYSFILGELWPKGKSQWEIFMEHVEELINQKISTYARNKALADLKGLGDALAVYHESLESWIENRNNTRVRSVVKNQYIALELMFVQKLPSFAVSGEEVPLLPIYAQAANLHLLLLRDASIFGKEWGLSESEISTFYNRQSSQTQEYSDYCSEWYNTGLNRLRGTNAESWVRYNQFRRDMTLMVLDLVALFPSYDTRMYPIPTSAQLTREVYTDAIGTVHPNASFASTTWYNNNAPSFSTIEAAVVRNPHLLDFLEQVTIYSLLSRWSNTQYMNMWGGHKLEFRTIGGTLNTSTQGSTNTSINPVTLPFTSRDVYRTESLAGLNLFLTQPVNGVPRVDFHWKFVTHPIASDNFYYPGYAGIGTQLQDSENELPPETTGQPNYESYSHRLSHIGLISASHVKALVYSWTHRSADRTNTINSDSITQIPLVKAFNLPSGASVVRGPGFTGGDILQRTNTGTFGDIRVNINPPFAQRYRLRIRYASTTNLEFHTSINGKAINQGNFSATMNRGEDLDYKAFRTVGFTTPFSFSNAQSTFTIGAWNFSLGNEVYIDRIEFVPVEVTYEAEYDLKKAQDEITAMFTSTNLRRLKTNVTDCHIDQVSNLVESLSDEFYLDEKRELFEIVKYAKQLNIERNM

SEQ ID NO: 223 - protein, 719 aa, Bacillus thuringiensis BTC007
MKLKNPDKHQSLSSNAKVDKIATDSLKNETDIELKNINHEDFLRMSEHESIDPFVSASTIQTGIGIAGKILGTLGVPFAGQIASLYSFILGELWPKGKSQWEIFMEHVEELIDQKISTYARNIALADLKGLGDALAVYHESLESWIKNRNNARATSVVKSQYIALELLFVQKLPSFAVSGEEVPLLPIYAQAANLHLLLLRDASVFGKEWGLSNSQISTFYNRQVERTSDYSDHCVKWYSTGLNNLRGTNAESWVRYNQFRKDMTLMVLDLIALFPSYDTLVYPIKTTSQLTREVYTDAIGTVHPNASFASTTWYNNNAPSFSAIESAVVRNPHLLDFLEQVTIYSLLSRWSNTQYMNMWGGHRLEFRTIGGVLNTSTQGSTNTSINPVTLPFTSRDVYRTESLAGLNLFLTQPVNGVPRVDFHWKFATLPIASDNFYYLGYAGVGTQLQDSENELPPETTGQPNYESYSHRLSHIGLISASHVKALVYSWTHRSADRTNTIEPNSITQIPLVKAFNLSSGAAVVRGPGFTGGDILRRTNTGTFGDIRVNINPPFAQRYRVRIRYASTTDLQFHTSINGKAINQGNFSATMNRGEDLDYKTFRTVGFTTPFSFSDVQSTFTIGAWNFSSGNEVYIDRIEFVPVEVTYEAEYDFEKAQEKVTALFTSTNPRGLKTDVKDYHIDQVSNLVESLSDEFYLDEKRELFEIVKYAKQIHIERNM

SEQ ID NO: 224 - protein, 710 aa, Bacillus thuringiensis
  MISC_FEATURE (200)..(200): Xaa is Ala, Arg, Asn, Asp, Asx, Cys, Glu, Gln, Glx, Gly, His, Ile, Leu, Lys, Met, Phe, Pro, Ser, Thr, Trp, Tyr, or Val.
MKSKNQNMHQSLSNNATVDKNFTGSLENNTNTELQNFNHEGIEPFVSVSTIQTGIGIAGKILGNLGVPFAGQVASLYSFILGELWPKGKSQWEIFMEHVEELINQKISTYARNKALADLKGLGDALAVYHESLESWIENRNNTRTRSVVKSQYITLELMFVQSLPSFAVSGEEVPLLPIYAQAANLHLLLLRDASIFGKXWGLSDSEISTFYNRQSGKSKEYSDHCVKWYNTGLNRLMGNNAESWVRYNQFRRDMTLMVLDLVALFPSYDTQMYPIKTTAQLTREVYTDAIGTVHPHPSFTSTTWYNNNAPSFSTIEAAVVRNPHLLDFLEQVTIYSLLSRWSNTQYMNMWGGHKLEFRTIGGTLNTSTQGSTNTSINPVTLPFTSRDVYRTESLAGLNLFLTQPVNGVPRVDFHWKFVTHPIASDNFYYPGYAGIGTQLQDSENELPPEATGQPNYESYSHRLSHIGLISASHVKALVYSWTHRSADRTNTIEPNSITQIPLVKAFNLSSGAAVVRGPGFTGGDILRRKNTGTFGDIRVNINPPFAQRYRVRIRYASTTDLQFHTSINGKAINQGNFSATMNRGEDLDYKTFRTVGFTTPFSFSDVQSTFTIGAWNFSSGNEVYIDRIEFVPVEVTYEAEYDFEKAQEEVTALFTSTNPRGLKTDVKDYHIDQVSNLVESLSDKFYLDEKRELFEIVKYAKQLHIERNM

SEQ ID NO: 225 - protein, 381 aa, Bacillus thuringiensis ly4a3
RDVIVIVLDLVALFPSYDTQMYPIKTTAQLTREVYTDAIGTVHPHPSFTSTTWYNNNAPSFSAIEAAVVRNPHLLDFLEQVTIYSLLSRWSNTQYMNMWGGHKLEFRTIGGTLNISTQGSTNTSINPVTLPFTSRDVYRTESLAGLNLFLTQPVNGVPRVDFHWKFVTHPIASDNFYYPGYAGIGTQLQDSENELPPEATGQPNYESYSHRLSHIGLISASHVKALVYSWTHRSADRTNTIEPNSITQIPLVKAFNLSSGAAVVRGPGFTGGDILRRTNTGTFGDIRVNINPPFAQRYRVRIRYASTTDLQFHTSINGKAINQGNFSATMNRGEDLDYKTFRTVGFTTPFSFLDVQSTFTIGAWNFSSGNEVYIDKIEFIP

SEQ ID NO: 226 - protein, 1167 aa, Bacillus thuringiensis EG5847
MEINNQKQCIPYNCLSNPEEVLLDGERILPDIDPLEVSLSLLQFLLNNFVPGGGFISGLVDKIWGALRPSEWDLFLAQIERLIDQRIEATVRAKAITELEGLGRNYQIYAEAFKEWESDPDNEAAKSRVIDRFRILDGLIEANIPSFRIIGFEVPLLSVYVQAANLHLALLRDSVIFGERWGLTTKNVNDIYNRQIREIHEYSNHCVDTYNTELERLGFRSIAQWRIYNQFRRELTLTVLDIVALFPNYDSRLYPIQTFSQLTREIVTSPVSEFYYGVINSGNIIGTLTEQQIRRPHLMDFFNSMIMYTSDNRREHYWSGLEMTAYFTGFAGAQVSFPLVGTRGESAPPLTVRSVNDGIYRILSAPFYSAPFLGTIVLGSRGEKFDFALNNISPPPSTIYRHPGTVDSLVSIPPQDNSVPPHRGSSHRLSHVTMRASSPIFHWTHRSATTTNTINPNAIIQIPLVKAFNLHSGATVVRGPGFTGGDILRRTNTGTFADMRVNITGPLSQRYRVRIRYASTTDLQFFTRINGTSVNQGNFQRTMNRGDNLESGNFRTAGFSTPFSFSNAQSTFTLGTQAFSNQEVYIDRIEFVPAEVTFEAESDLERAQKAVNALFTSTNQLGLKTDVTDYQIDQVSNLVECLSDEFCLDEKRELSEKVKHAKRLSDKRNLLQDPNFTSINRQLDRGWRGSTDITIQGGNDVFKENYVTLPGTFDECYPTYLYQKIDESKLKAYTRYELRGYIEDSQDLEVYLIRYNAKHETVNVPGTGSLWPLSVESPIGRCGEPNRCVPHIEWNPDLDCSCRDGEKCAHHSHHFSLDIDVGCTDLNEDLGVWVIFKIKTQDGHARLGNLEFLEEKPLLGEALARVKRAEKKWRDKREQLQFETNIVYKEAKESVDALFVDSHYNRLQADTNITMIHAADKRVHRIREAYLPELSVIPGVNADIFEELEGLIFTAFSLYDARNIIKNGDFNNGLSCWNVKGHVDIQQNDHRSVLVVPEWESEVSQEVRVCPGRGYILRVTAYKEGYGEGCVTIHEIEDNTDELKFSNCIEEEVYPTDTGNDYTAHQGTTGCADACNSRNVGYEDGYEINTTASVNYKPTYEEEMYTDVRRDNHCEYDRGYGNHTPLPAGYVTKELEYFPETDTVWIEIGETEGTFIVDSVELLLMEE

SEQ ID NO: 227 - protein, 1168 aa, Bacillus thuringiensis
MEINNQNQCIPYNCLSNPEEVFLDGERILPDIDPLEVSLSLLQFLLNNFVPGGGFISGLLDKIWGALRPSDWELFLAQIEQLIDRRIERTVRAKAIAELEGLGRSYQLYGEAFKEWEKTPDNTAARSRVTERFRIIDAQIEANIPSFRVSGFEVPLLLVYTQAANLHLALLRDSVVFGERWGLTTTNVNDIYNRQVNRIGEYSKHCVDTYKTELERLGFRSIAQWRIYNQFRRELTLTVLDIVAVFPNYDSRLYPIRTISQLTREIYTSPVSEFYYGVINSNNIIGTLTEQQIRRPHLMDFFNSMIMYTSDNRREHYWSGLEMTATNTEGHQRSFPLAGTIGNSAPPVTVRNNGEGIYRILSEPFYSAPFLGTSVLGSRGEEFAFASNTTTSLPSTIYRNRGTVDSLVSIPPQDYSVPPHRGYSHLLSHVTMRNSSPIFHWTHRSATPRNTIDPDSITQIPAVKGAYIFNSPVITGPGHTGGDIIRFNPNTQNNIRIPFQSNAVQRYRIRMRYAAEADCILESGVNIVTGAGVTFRPIPIKATMTPGSPLTYYSFQYADLNINLTAPIRPNNFVSIRRSNQPGNLYIDRIEFIPIDPIREAEHDLERAQKAVNALFTSSNQLGLKTDVTDYHIDQVSNLVACLSDEFCLDEKRELSEKVKHAKRLSDERNLLQDQNFTGINRQVDRGWRGSTDITIQGGNDVFKENYVTLPGTFDECYPTYLYQKIDESKLKPYTRYELRGYIEDSQDLEVYLIRYNAKHETLNVPGTGSLWPLAAESSIGRCGEPNRCAPHIEWNPELDCSCRDGEKCAHHSHHFSLDIDVGCTDLNEDLGVWVIFKIKTQDGYARLGNLEFLEEKPLLGEALARVKRAEKKWRDKRDKLEWETNIVYKEAKESVDALFVDSQYNRLQTDTNIAMIHVADKRVHRIREAYLPELSVIPGVNAAIFEELEGLIFTAFSLYDARNVIKNGDFNHGLSCWNVKGHVDVEEQNNHRSVLVVPEWEAEVSQEVRVCPGRGYILRVTAYKEGYGEGCVTIHEIEDHTDELKFRNCEEEEVYPNNTVTCNDYPANQEEYRAAETSRNRGYGESYESNSSIPAEYAPIYEKAYTDGRKENSCESNRGYGNYTPLPAGYVTKELEYFPETDKVWIEIGETEGTFIVDSVELLLMEE

SEQ ID NO: 228 - protein, 1168 aa, Bacillus thuringiensis
MEINNQNQCIPYNCLSKPEEVFLDGERILPDIDPLEVSLSLLQFLLNNFVPGGGFISGLIDKIWGALRPSEWELFLAQIEQLIDRRIEATVRAKAIAELEGLGRSYQLYGEAFKEWEKTPDNTAARSRVTERFRIIDAQIEANIPSFRVSGFEVPLLSVYTQAANLHLALLRDSVIFGERWGLSTTNVNDIYNRQVKRIHEYSDHCVDTYKTELERLEFRSIAQWRIYNQFRRELTLTVLDIVALFPNYDGRLYPIRTISQLTREIYTSPVSEFYYGPIYNHNMIGTFIERQLRRPHLMDFFNSMTMYTSDNRREYYWSGLEMTATLTSGNQVSFPLAGTRGNSAPPVSVRKTGEGIYRILSEPFYSAPFLGTSVLGSRGEEFAFASNTTTSLPSTIYRNRGTVDSLVSIPPQDYSVPPHRGYSHLLSHVTMHNSSPIFHWTHRSATPRNIIYPDSITQIPVVKASHLSGGSVIKGPGHTGGDLISLPVNNFTHFRIPFQANTPQRYRIRICYAADSDGTLDSGVFLSAAAGDGFNTTSYRATMSPEGSLTSRDFQFLDLNTSFTSDVASNLWLHFIRYIRPGNLYIDRAEFIPVDATFEAGYNLERAQKAVNALFTSTNQKGLQTDVTDYHIDQVSNLVDCLSDEFCLDEKRKLSEKVKQAKRLSDERNLLQDSNFRGINREQDRGWRGSTDITIQGGNDVFKENYVTLPGTFDACYPTYLYQKVDESKLKAYTRYQLRGYIEDSQDLEVYLIRYNAKYETLNVPGMGSLWPLSVESPIGKCGEPNRCVPQLEWNPDFDCSCRDGEKCAHHSHHFSLDIDVGCTDLNENLGIWVIFKIKTQDGHARLGNLEFLEEKPLLGEALARVKRAEKKWRDKREILQSETNIVYKEAKEAVDGLFVDSQYERLQSDTNIAMIHAADKRVHRIREAYLPELSVIPGVNAAIFEELEGRIFTAYSLYDARNVIKNGDFNNGLSCWNVKGHVDIKQNGHRSVLVIPEWEAQVSQEVRVCPGRGYILRVTANKEGYGEGCVTIHEIENHTEKLKFRNCEEEEVYPNNTGTCNDYTAHQQGTAGCADACNTRNVGYEDAYEMNTTTSVNYKPTYEEEVYTDGRRDNPCEMERGYTPLPVGYVTKELEYFPETNTVWIEIGETEGKFIVDSVELLLMEE

SEQ ID NO: 229 - protein, 1215 aa, Bacillus thuringiensis morrisoni BF190
MNSNRKNENEIINALSIPAVSNHSAQMDLSPDARIEDSLCVAEGNNIDPFVSASTVQTGISIAGRILGVLGVPFAGQLASFYSFLVGELWPSGRDPWEIFMEHVEQIVRQQQITDSVRDTAIARLEGLGRGYRSYQQALETWLDNRNDARSRSIIRERYIALELDITTAIPLFSIRNEEVPLLMVYAQAANLHLLLLRDASLFGSEWGMSSADVNQYYQEQIRYTEEYSNHCVQWYNTGLNRLRGTTAETWVRYNQFRRDLTLGVLDLVALFPSYDTRTYPIPTTAQLTREVYTDPNGVVAGPNNSWFRNGASFSAIENAIIRQPHLYDFLTNLTIYTRRSQVGTTIMNLWAGHRITFNRIQGGSTSEMVYGAITNPVSVSDIPFVNRDVYRTVSLAGGLGSLSGIRYGLTRVDFDMIFRNHPDIVTGLFYHPGHAGIATQVKDSDTELPPETTEQPNYRAFSHLLSHISMGPTTQDVPPVYSWTHQSADRTNTINSDRITQIPLVKAHTLQSGTTVVKGPGFTGGDILRRTSGGPFAFSNVNLDFNLSQRYRARIRYASTTNLRIYVTVAGERIFAGQFDKTMDAGAPLTFQSFSYATINTAFTFPERSSSLTIGADTFSSGNEVYVDRFELIQVTATFEAESDLERARKAVNALFTSTNPRGLKTDVTDYHIDQVSNLVECLSDEFCLDKKRELLEEVKYAKRLSDERNLLQDPTFTSISGQTDRGWIGSTGISIQGGDDIFKENYVRLPGTVDECYPTYLYQKIDESQLKSYTRYQLRGYIEDSQDLEIYLIRYNAKHETLSVPGTESPWPSSGVYPSGRCGEPNRCAPRIEWNPDLDCSCRYGEKCVHHSHHFSLDIDVGCTDLNEDLGVWVIFKIKTQDGHAKLGNLEFIEEKPLLGKALSRVKRAEKKWRDKYEKLQLETKRVYTEAKESVDALFVDSQYDKLQANTNIGIIHGADKQVHRIREPYLSELPVIPSINAAIFEELEGHIFKAYSLYDARNVIKNGDFNNGLSCWNVKGHVDVQQNHHRSVLVLSEWEAEVSQKVRVCPDRGYILRVTAYKEGYGEGCVTIHEFEDNTDVLKFRNFVEEEVYPNNTVTCNDYTTNQSAEGSTDACNSYNRGYEDGYENRYEPNPSAPVNYTPTYEEGMYTDTQGYNHCVSDRGYRNHTPLPAGYVTLELEYFPETEQVWIEIGETEGTFIVGSVELLLMEE

SEQ ID NO: 230 - protein, 1170 aa, Bacillus thuringiensis kurstaki K1
MDNNPKIQECIPYNCLNNPESEILDIEGLSTRSREQVAEISLGLTRFLLENLFPGATFGFGLFDIIWGIFGPDQWSMFLEQIEQLIDQRIETVERNRAIQTLIGLSNSYDVNIEALKEWENNPDNSASQERVRNRFRTTDDALITSIPLLAIPNFEIATLSVYVQAANLHLSLLRVAVFFGERWGLTQINVDDLYRRLTNNIRKYSDHCARWYNEGLDNISGLSRSINFQREVTISVLDIVALFPNYDIRTYPISTTSQLTREIFTSPIVVPNDFSVAYEGVRRAPHLFDFLEKLVIYTGDRSGIRHWAGHEITSRRTDSYHGIIRYPLYGTAANAESPYTLALQPSESIYRTLSEPIFSQTGGLSPHRRRVVEGVEFSIVNNNVNPSSFVYRRKGSLDSFTELPPEDESVPPYIGISHQLCHVGFGRTNVIFEPSNFARVPVFSWTHRSATPTNTIDPDRITQIPSVKASSLRNSTVVSGPGFTGGDIVRMGAVHQIYATDLSMNVRPSVALSRYLIRLRYACRGSSNIVIHGPSIRFVSLPSTMSNDEPLTYQSFRYASITTPITRPIYNMFNLSISRISGVQNLFIDRIEFIPVDANFEAERDLERAQKAVNALFTSTNQRGLKIDVTDYHIDQVSNLVDCLSDEFCLDEKRELSEKVKHAKRLSDERNLLQDLNFKDINRQPERGWSGSTGITIQGGDDVFKENYVTLPGTFDECYPTYLYQKIDESKLKAYTRYQLRGYIEDSQDLEIYLIRYNAKHETVNVPGSGSLWPLSVESSVGKCGEPNRCASRMEWNPDLDCSCRDGEKCAHHSHHFSLDIDVGCTDLNEDLGVWVIFKIKTQDGHAKIGNLEFLKEKLLLGEALARVKKAEKKWRDKRDKLEWETNVVYKEAKESVDALFVDSQYSRLQADTNIAMIHAADKRVHRIREAYLPELTVIPGVNASIFEELEGRIFTAYSLYGARNVIKNGDFNNGLSCWNVKGHVEVQQIHHRSVLVVPSWKTEVSQEVCVCPGRGYILRVTAYKEGYGEGNVTIHEIENNTDELKFRNCEEEEVYPNNTVTCNDYTVNQEEYKGTCTSRNRGYDESYESSSSESAYYASVYEEKGYTDGRRENLCEFNRGYGDYTSLPTAYVTKELEYFPETDKVWIEIGETEGAFILDSVELLLMEE

SEQ ID NO: 231 - protein, 699 aa, Bacillus thuringiensis LBIT 1189
MKPNNQNNHQTLLSNVTVDKPFADALKNETTMELKNSNHEDCLKMSEHESIEPFVSASTIQTGIGIAGKILGSLGVPFAGQVASLYSFILGELWPKGKSQWEIFMEHVEELVAQKISTYARNKALSDLKGLGDALAVYHESLESWIENRNNTRARSVVKNQYIALELMFVQNLPSFAVSGEEVPLLPIYRQAANLHLLLLRDASTFGKEWGLSTSEISTFYNRQSNRTIEYSDYCSKWYNTGLNRLRGTNAESWVRYNQFRRDMTLMVLDLVALFPSYDTHMYPIKTSAQLTREVYTDLNGVVAGPNNSWFKNGASFSAIENAIIRKPHLYDFITNLTIYTRISRANPSYMNLWAGHRITFNRIGSSNSSELVYGAITNPVSTSSLSFVNEDIYRTTSLAGALGTLSGLIYGLTKADFDTRFRNHTNIASGKTYFPGHSGIGTQVRNSETELPPETTEQPSYRAFSHLLSHISMSPTTAATPPVYSWTHQSADRTNTINSDSITQIPLVKANNLHPGAIVVKGPGFTGGDILRRTSTGTFVDLPVNLINWQLSQRYRVRIRYASTTDLQFHTSINGRAINQGNFSATMNRGDALESRTFRTAGFTTPFNFSDAQSTFTISAWNFSSGNEVYIDQIEFIPTEVTFEAEYDSEKAQKAVNDLFTPTNPRGLKADVTDYHIDQVSNLVECLFDEDCHNEKRE

SEQ ID NO: 232 - protein, 753 aa, Bacillus thuringiensis fukuokaensis
MNPYQNNDEIVDVPENYDNNLNRYPYANDPNVAMQNTNYKDWMNGYEEINPSSITAILASIGILNRVIALTGVLGNTQEVISIIQDALGFIRNGTGNELLIHVEQLIQQTLATQYRSAATGAIYGISRSYDNYLMFFRQWERNRTRENGQQVESAFTTINTLCINALAPQASLSRRGFETLLLPNYAMAANFHLLLLRDAVLYRNQWLSNSISTANVNLNILRAAINEYITHCTRWYQDGLNRFDRSSRANMNEWRRFNAYRRDMTLSVLDFATVFPTYDPVLFPAATNVELTRVVYTDPIVMAGGRTAIPGFTRMENLVNSASRVSFLNQMNIYTSFYFRPHNIPRYYWSGNQNFLSNGTSNLYGYRSDGRTTFNVSNIDIFRVNMTTHIGGAFTDDYRGLHRAEFIGANTQNNQRTSLLYSVEIPSSHFRFENHTVFLPGESGLEPNERNYTHRLFQMMNEVSVNPNARGRVFLHAWTHRSLRRTNGLRSDQILQIPAVKTISNGGDRAVVLNYGENIMKLDNLTTGLSYKLTAVDSEASNTRFIVRVRYASMNNNKLNLVLNGAQIASLNVEHTVQRGGSLTDLQYGNFKYATFAGNFKMGSQSILGIFKEIPNIDFVLDKIELIPSNFMSSLEQTQNYNTYNQDTIYTHNQGYDTYDQNSSGMYHQSYNNYDQNMDTTYQPSYDNYNQNASGTYDDGYNPNASDSYDQSYTNNYSQNTNSMYDQGYYNNNYDQHSGCTCNQGYDNNYLK

SEQ ID NO: 233 - protein, 765 aa, Bacillus thuringiensis higo LBIT-976
MNPYQNKNEYEIVNNPQNYNTVSNRYPYTNDPNVAIQNTNYKDWMNGYEEINPSLISLILASIGILNQAIALTGVLGKTPENINIVQEMVGLISGSTGNDLLVHTEQLIQQTLAQQYRNAATGAVNAISKSYNDYLMFFRQWERNRTSQNGLLVESAFNSVNTLCLRTLTPQEALSRRGFETLLLPNYAQAANFHLLLLRDAVLYRTQWLPNFISTTNANIEILERSINQYRNHCNHWYNDGLNRFARTSFDDWVRFNAYRRDMTLSVLDFVTVFPTYNPINFPTPTNVELTRIVYTDPISPPRGYARTGSPSFRQMEDLIISGSPSFLNQLSIFTTYYHDPRNVNRDFWAGNRNYLSNGTSRQSGATTPWRTNIPMQNIDIFRVNLTTHDIDDISRSYGGVHRSDFIGVNTINNQRTTLFYHQNVDTSRFLIRNETVFLPGDSGLAPNERNYTHRLFQVMTTYRTNPNARRAAFLHAWTHRSLRRRNGFRTDQIMQIPAVKSISNGGDRAVISYTGENMMKLDNLTASLSYKLTAEDSEASNTRFIVRIRYASMNNNRLNLILNGTQIASLNVEGTMQNGGSLTNLQSENFKYATFSGNFKMGSQSIVGIFKEISNADFIFDQIEFIPIHFMPLLEQKQSYNNYDQNMDTTYQPNYDTYNQNANGMYDDTYYPNNNDSYNQNNTDMYDSGYNNNQNTNYNYDQEYNTYNQNMENTYDQSYENYNPETNNYNQYPNDMYNQEYTNDYNQNSGCRCNQGYNNNYPK

SEQ ID NO: 234 - protein, 1286 aa, Bacillus thuringiensis roskildiensis
MADLTELYPSYHNVLARPIRLDSIFDPFIDIFNALKGGWEEFAKTGYKDPLEQHLKIAWNASQNGTIDYLALTKASISFIGLIPDADAVVPFINMFVDFIFPKLFGEGSQQNSQAQFFELIIEKVKEIVDQEFRNFTLNTLLNDLDGMQTTLEHFQNDVQIAICQGEQPGLILDEKHPPCTPTKNHLVSVKESFKNARTSIETVLPHFKNPMTNNKTPDFNSDTVLLTLPMYTTAATLNLILHQGYIQFVERWKSVDYDEAFINQTKADLQHRIQEYSTTVSTTFEKFKPTLSNKKSSINTYNKYVRSMTLNCLDIAATWPTLDNVNYPSNVEIQLDQTRLVFSNLVGPFEGNDDISTYTRRSIMNYSKGDTPGDVNSAIQSLRYPRLELSKVQFYTHDQRSNGVRHCYTSGFNLTFNDNSSMSAKQDESATADSPPLTAPIKNMNANSQNSQYYDYSSINIDNQGGGGCSAFPSYQSNNPILPNQKINVFYPYGSSAHPIDPHTTDPDTWFKLGYVSSHIPYDLTPQNVIGEIDQDTKQPSLILKGFPAEKGYGGSIEYVSEPLNGANAAKLTLNQILYMQVTNLTTQKYQIRLRYATKNDTTASVWFHIIGPNNQDIINHSPDIPPRSNNKMFVQGENGKYVLDTLVDSIELPSGQLTILIQNINPDQDLFLDRIEFVPIPTLPTNPNISIPKTDTSPKDSKVLWEASPDIPIANTITLTGSVYDFADITFELYKNGNMVTSYPIKGPGPIPHRSHGNYVSCSQGILSYNYENKPVLDGFDQLRININSDPSFYDSNSGCDTKNQYSAEIKINPNLSATTDLEKITNQVNQLFTSSSQTELANTITDYRIDQIVMKVDALSNNVFGVEKKALRKLVNQAKQLSKARNVLAGGNFEKGHEWVLGREATMIANHELFKGDHLLLPPPTLYPSYAYQKIDESKLKSNTRYTVSGFIAQSEHLEVIVSRYGKEVHDMLDVPYEEALPISSDESPNCCKPATCQCPSCDGSQPDSHFFSYSIDVGSVQSDVNLGIEFGLRIAKPNGFAKISNLEIKEDRPLTDQEIKKIQRKEQKWKKAFDQEQAEVAATFQPTLDQINALYQNEDWNGSLHPHVTYQHLSAVVLPTLPKQRHWFMEDREGEHYGVTQQFQQALDRGFQQIEEQNLIHNGSFANGLTDWTVTGDAQLTIFDEDPVLELAHWDASVSQTIEIMDFEEETEYKLRVRGKGKGTVTVQHGEEELETMTFNTTSFTTQEQTFYFEGDTVDVHVQSENNTFLVDSVELIEVVEE

SEQ ID NO: 235 - protein, 722 aa, Bacillus thuringiensis
MKEQNLNKYDEITVQAASDYIDIRPIFQTNGSATFNSNTNITTLTQAINSQAGAIAGKTALDMRHDFTFRADIFLGTKSNGADGIAIAFHRGSIGFVGTKGGGLGILGAPKGIGFELDTYANAPEDEVGDSFGHGAMKGSFPSFPNGYPHAGFVSTDKNSRWLSALAQMQRIAAPNGRWRRLEIRWDARNKELTANLQDLTFNDITVGEKPRTPRTATWRLVNPAFELDQKYTFVIGSATGASNNLHQIGIIEFDAYFTKPTIEANNVNVPVGATFNPKTYPGINLRATDEIDGDLTSKIIVKANNVNTSKTGVYYVTYYVENSYGESDEKTIEVTVFSNPTIIASDVEIEKGESFNPLTDSRVGLSAQDSLGNDITQNVKVKSSNVDTSKPGEYEVVFEVTDSFGGKAEKDFKVTVLGQPSIEANNVELEIDDSLDPLTDAKVGLRAKDSLGNDITKDIKVKFNNVDTSNSGKYEVIFEVTDRFGKKAEKSIEVLVLGEPSIEANDVEVNKGETFEPLTDSRVGLRAKDSLGNDITKDVKIKSSNVDTSKPGEYEVVFEVTDRFGKYVEKTIGVIVPVIDDEWEDGNVNGWFYAGQDIKLLKDPDKKAYKGDYVFYDSRHVAISKTIPLTDLQINTNYEITVYAKAESGDHHLKVTYKKDPAGPEEPPVFNRLISTGTLVEKDYRELKGTFRVTELNKAPLIIVENFGAGYIGGIRIVKIS

SEQ ID NO: 236 - protein, 722 aa, Bacillus thuringiensis FZ-4
MKEQNLNKYDEITVQAASDYIDIRPIFQTNGSATFNSNTNITTLTQAINSQAGAIAGKTALDMRHDFTFRADIFLGTKSNGADGIAIAFHRGSIGFVGTKGGGLGILGAPKGIGFELDTYANAPEDEVGDSFGHGAMKGSFPSFPNGYPHAGFVSTDKNSRWLSALAQMQRIAAPNGRWRRLEIRWDARNKELTANLQDLTFNDITVGEKPRTPRTATWRLVNPAFELDQKYTFVIGSATGASNNLHQIGIIEFDAYFTKPTIEANNVNVPVGATFNPKTYPGINLRATDEIDGDLTSKIIVKANNVNTSKTGVYYVTYYVENSYGESDEKTIEVTVFSNPTIIASDVEIEKGESFNPLTDSRVGLSAQDSLGNDITQNVKVKSSNVDTSKPGEYEVVFEVTDSFGGKAEKDIKVTVLGQPSIEANNVELEIDDLFDPLTDAKVGLRAKDSLGNDITKDVKVKFNNVDTSNSGKYEVIFEVTDRFGKKAEKSIEVLVLGEPSIEANDVEVNKGETFEPLTDSRVGLRAKDSLGNDITKDVKIKSSNVDTSKPGEYEVVFEVTDRFGKYAEKTIGVIVPVIDDEWEDGNVNGWKFYAGQDIKLLKDPDKAYKGDYVFYDSRHVAISKTIPLTDLQINTNYEITVYAKAESGDHHLKVTYKKDPAGPEEPPVFNRLISTGTLVEKDYRELKGTFRVTELNKAPLIIVENFGAGYIGGIRIVKIS

SEQ ID NO: 237 - protein, 721 aa, Bacillus thuringiensis EG4140
MKDSISKGYDEITVQASDYIDIRSIFQTNGSATFNSTTNITTLTQATNSQAGAIAGKTALDMRHDFTFRADIFLGTKSNGADGIAIAFHRGSIGFVGEKGGGLGILGALKGIGFELDTYANAPQDEQGDSFGHGAMRGLFPGFPNGYPHAGFVSTDKNRGWLSALAQMQRIAAPNGRWRRLAIHWDARNKKLTANLEDLTFNDSTVLVKPRTPRYARWELSNPAFELDQKYTFVIGSATGASNNLHQIGIIEFDAYFTKPTIEANNVSVPVGATFNPKTYPGINLRATDEIDGDLTSEIIVTDNNVNTSKSGVYNVTYYVKNSYGESDEKTIEVTVFSNPTIIASDVEIEKGESFNPLTDSRVRLSAQDSLGNDITSKVKVKSSNVDTSKPGEYDVVFEVTDNFGGKAEKEIKVTVLGQPSIEANDVELEIGDLFNPLTDSQVGLRAKDSLGKDITNDVKVKSSNVDTSKPGEYEVVFEVTDRFGKKAEKSIKVLVLGEPSIEANNVEIEKDERFDPLTDSRVGLRAKDSLGKDITNDVKVKSSNVDTSKPGEYEVVFEVTDRFGKYVKKLIVVIVPVIDDEWEDGNVNGWKFYAGQDITLLKDPEKAYKGEYVFYDSRHAAISKTIPVTDLQVGGNYEITVYVKAESGDHHLKVTYKKDPKGPEEPPVFNRLISTGKLVEKDYRELKGTFRVTELNQAPLIIVENFGAGYIGGIRIVKIS

SEQ ID NO: 238 - protein, 716 aa, Bacillus thuringiensis
MKDSISKGYDEITVQASDYIDISIFQTNGSATFNSTTITTLTQATNSQAGAIGKTALDMRHDFTFRAIFLGTKSNGADGIAIAFHRGSIGFVGEKGGGGILGALKGIGFELDTYANAPQDEQGDSFGHGAMRGLFPGFPNGYPHAGFVSTDKNRGWLSALAQMQRIAAPNGRWRRLAIHWDARNKKLTANLEDLTFNDSTVLVKPRTPRYARWELSNPAFELDQKYTFVIGSATGASNNLHQIGIIEFDAYFTKPTIEANNVSVPVGATFNPKTYPGINLRATDEIDGDLTSEIIVTDNNVNTSKSGVYNVTYYVKNSYGESDEKTIEVTVFSNPTIIASDVEIEKGESFNPLTDSRVRLSAQDSLGNDITSKVKVKSSNVDTSKPGEYDVVFEVTDNFGGKAEKEIKVTVLGQPSIEANDVELEIGDLFNPLTDSQVGLRAKDSLGKDITNDVKVKSSNVDTSKPGEYEVVFEVTDRFGKKAEKSIKVLVLGEPSIEANNVEIEKDERFDPLTDSRVGLRAKDSLGKDITNDVKVKSSNVDTSKPGEYEVVFEVTDRFGKYVKKLIVVIVPVIDDEWEDGNVNGWKFYAGQDITLLKDPEKAYKGEYVFYDSRHAAISKTIPVTDLQVGGNYEITVYVKAESGDHHLKVTYKKDPKGPEEPPVFNRLISTGKLVEKDYRELKGTFRVTELNQAPLIIVENFGAGYIGGIRIVKIS

SEQ ID NO: 239 - protein, 632 aa, Bacillus thuringiensis
MNSKSIIEKGVQENQYIDIRNICSINGSAKFDPNTNITTLTEAINSQAGAIAGKTALDMRRDFTLVADIYLGSKSSGADGIAIAFHRGSIGFIGTMGGGLGILGAPNGIGFEIDTYWKATSDETGDSFGHGQMNGAHAGFVSTNRNASYLTALAPMQKIPAPNNKWRVLTINWDARNNKLTARLQEKSNDASTSTPSPRYQTWELLNPAFDLNQKYTFIIGSATGAANNKHQIGVTLFEAYFTKPTIEANPVDIELGTAFDPLNHEPIGLKATDEVDGDITKDITVEFNDIDTSKPGAYRVTYKVVNSYGESDEKTIEVVVYTKPTITAHDITIKKDLAFDPLNYEPIGLKATDPIDGDITDKIAVKFNNVDTSKPGKYHVTYKVINSYEKIDEKTIEVTVYTKPSIVAHDVEIKKDTAFDPLNYEPIGLKATDPIDGDITDKITVESNDVDTSKPGAYSVKYKVVNNYEESDEKTIAVTVPVIDDGWENGDPTGWKFFSGETITLEDDEEHALNGKWVFYADKHVAIYKQVELKNNIPYQITVYVKPEDEGTVAHHIVKVSFKSDSAGPESEEVINERLIDAEQIQKGYRKLTSIPFTPTTIVPNKKPVIIVENFLPGWIGGVRIIVEPTK

SEQ ID NO: 240 - protein, 267 aa, Bacillus thuringiensis
MGIINIQDEINNYMKEVYGATTVKSTYDPSFKVFNESVTPQFTEIPTEPVNNQLTTKRVDNTGSYPVESTVSFTWTETHTETSAVTEGVKAGTSISTKQSFKFGFVNSDVTLTVSAEYNYSTTNTTTTTETHTWSDSTKVTIPPKTYVEAAYIIQNGTYNVPVNVECDMSGTLFCRGYRDGALIAAVYVSVADLADYNPNLNLTNKGDGIAHFKGSGFIEGAQGLRSIIQVTEYPLDDNKGRSTPITYLINGSLAPNVTLKNSNIKF

SEQ ID NO: 241 - protein, 674 aa, Bacillus thuringiensis jegathesan
MNQYQNKNEYEILESSQNNMNMPNRYPFADDPNAVMKNGNYKDWVNECEGSNISPSPAAAITSKIVSIVLKTLAKAVASSLADSIKSSLGISKTITENNVSQVSMVQVHQIINRRIQETILDLGESSLNGLVAIYNRDYLGALEAWNNNKSNINYQTNVAEAFKTVEREFFTKLKGIYRTSSSQITLLPTFTQAANLHLSMLRDAVMYQEGWNLQSHINYSKELDDALEDYTNYCVEVYTKGLNALRGSTAIDWLEFNSFRRDMTLMVLDLVAIFPNYNPVRYPLSTKISLSRKIYTDPVGRTDSPSFGDWTNTGRTLANFNDLEREVTDSPSLVKWLGDMTIYTGAIDSYRPTSPGDRIGVWYGNINAFYHTGRTDVVMFRQTGDTAYEDPSTFISNILYDDIYKLDLRAAAVSTIQGAMDTTFGVSSSRFFDIRGRNQLYQSNKPYPSLPITITFPGEESSEGNANDYSHLLCDVKILQEDSSNICEGRSSLLSHAWTHASLDRNNTILPDEITQIPAVTAYELRGNSSVVAGPGSTGGDLVKMSYHSVWSFKVYCSELKNYRVRIRYASHGNCQFLMKRWPSTGVAPRQWARHNVQGTFSNSMRYEAFKYLDIFTITPEENNFAFTIDLESGGDLFIDKIEFIPVSGSAFEYEGKQNIEKTQKAVNDLFIN

SEQ ID NO: 242 - protein, 675 aa, Bacillus thuringiensis sotto
MVNPYQNKKESVFYEHSNNQKDIPNRYPFTNNPNAVMKNGNYKDWVNECEGSNVSPSPAAAVTSAIISIVLKTLAKALVSSLVDAIKSSLGISEVITKNNVSQLSMELVNQLINRRIQETIMDLGSASLNGLMSIYKRYLNALEAWDKDKSNITLQENVIEEFKYVESRFFENLKGIYRTSSSQITLLPTFAQAANLHLSMLRDAVMYQEGWNLQSHLDYKMELDIALKDYTNYCVEVYNRGLNALRGSTALDWLEFNSFRRDMTLMVLDLVAIFPNYDPVQYPLPTKIGLSRKIYTDPVGTTRDTDFGNWTLTDRTLANFNDLERDVTDSPSLVKWLVDMNIYTGAIDSYPISGPGGERIGVWYGNMNSFVLTGSRELSYNMYGEIAHEDPITNIRDNDIYKVDLRAAYVATIRNALDSTFGVSSSHFFNVMGKNELYQSKQPYPSYPITITFPGEESLEGNVNDYSHLLCNVKNITGGLRQTSARGRSSLLSHAWTHKSLNPKNIIAADKITHIPAVKGSNLSASSAVIKGPGFTGGDLLRLGPNQFVDYILTPDNPQVSQIYFDVRLRYACMGGANILIQFWNKNWEIGVQLVSTTSSLENLKYENFAYITTRLSFTFGQGGYNMSIYNPTSNPNVIIDKIEFIPVSGTPFEYEGKHKLKNTQADVNNLFLN

SEQ ID NO: 243 - protein, 686 aa, Bacillus thuringiensis FCC-41
MNPYQNKNKYEILESSSDYTKISNKYPFANDPNITMKHMNYKDWMHMCETPTPFSASIIISVISIFGRVLGLSSSFANTSKYIAIITGILGLLGSSSSGSTNVWDNLIKHIEELTDRFIDTSVRFTGMSTVNGLNSQYLYYLDLFEDWYEDQNNEQKRNRLVGTFQTLGLAFINALGYRNTNGQEVRGTLSTAYEVQFLPSYAQAANLHLLLLKDAVTYGDKWILIEPTSNYYNRFKDNIARYTDYCTEYFHKGLDNLKKPGSDAVSWLRFNGFRRDMTLMVLDLITLFPLYDSVQYPLPTQIELSRQIYTDPVGATFSDFSNWTLTNRTLANFNDLEREVTDAPSLLKWLNSIEVYTGAIDSHRPTSPGERIGVWYGNRNTYINPDTNEVSYRFTGELAYENPYTFIGSFFDNDIYKVALRAAAVSTTFGSNDSTFGVSSSQFFNRRGIHQLYESSQPIPSWPITLAFPGEESSEGNANDYSHRLCDVKNITGGLRQTPARGRSSLLSHAWTHSSLKLRNIIAADKITQIPAVKTWEIRGTSSVVAGPGNTGGNLVKMSYHSVWNIKFTCQQLKRYRVRIRYASDGNCQLAMRRWRGGPGYVQEARHTVQRTFSGSMTYDSFKYLDIFTMPAEDYTFNLTIDLESGGALYIDKIEFTPDDITTLEYEGERDLEKTKNTVNDLFTN

SEQ ID NO: 244 - protein, 675 aa, Bacillus thuringiensis jegathesan
MNPYQNKSECEILNAPLNNINMPNRYPFANDPNAVMKNGNYKDWLNECDGITPSIFGTLGVLASIVISTINLATSPSIGDAFALVSSIGEYWPETKTSFPLSVADVNRLIREALDQNAINRATGKFNGLMDTYNTVYLKNLQDWYDTRIPANPQGDSQLREAARRSLEEIERDFRKALAGEFAEAGSQIVLLPIYAQAANIHLLILKDAMQFRTDLGLIRPVGVPITTSAEDPFESEFLLRIKKYTDHCISYYDDGLAKIRSRGSDGETWWEFNKFRREMTLTVLDLVALYPTHNIKLYPIPTQTELSRVVYTDPVGCFGNRKSDIFSRLNFDYLENRLTRPREPFNYLNSVQLFASTVSNSNNGEVLRGNLNKIMFEGGWTASRSGDGVTTGTPFSTMDWSYGWGYPRKHYAEITSRSQALPGLNNSIHVIVGIDSFRAIGPGGQGDHTFSLPGGDMYDCGKVQINPLEDYRNSDHWISDMMTINQSVQLASNPTQTFAFSALSLGWHHSSAGNRNVYVYDKITQIPATKTVREHPMIKGPGFTGGDLADLSSNSDILQYDLRSDYDDRLTEDVPFRIRIRCASIGVSTISVDNWGSSSPQVTVASTAASLDTLKYESFQYVSIPGNYYFDSAPRIRLLRQPGRLLVDRIEIIPVNFFPLSEQENKSVDSLFIN

SEQ ID NO: 245 - protein, 1163 aa, Bacillus thuringiensis finitimus B-1166
MNSEEMNHVNPFEISDNNDVSIPSQRYPFANDPADSVFCADDFLQSYGEFNMDNFGESEPFIDASGAINAAIGVTGTVLGFLGVPFAGALTTFYQKLFGFLFPNNNTKQWEEFMKQVEALIDEKISDAVRNKAISELQGLVNNITLYTEALEEWLENKENPAVRDRVLQRWRILDGFFEQQMPSFAVKGFEVLLLVVYTQAANLHLLSLRDAYIYGAEWGLTPTNIDQNHTRLLRHSAEYTDHCVNWYNTGLKQLENSDAKSWFQYNRFRREMTLSVLDVIALFPAYDVKMYPIPTNFQLTREVYTDVIGKIGRNDSDHWYSANAPSFSNLESTLIRTPHVVDYIKKLKIFYATVDYYGIYGRSGKWVGHIITSATSANTTETRNYGTIVNHDSVELNFEGKNIYKTGSLPQGVPPYQIGYVTPIYFITRAVNFFTVSGSKTSVEKYYSKKDRYYSEGLPEEQGVFSTEQLPPNSIAEPEHIAYSHRLCHVTFISVSNGNKYSKDLPLFSWTHSSVDFDNYVYPTKITQLPATKGYNVSIVKEPGFIGGDIGKNNGQILGKYKVNVEDVSQKYRFRVRYATETEGELGIKIDGRTVNLYQYKKTKAPGDPLTYKAFDYLSFSTPVKFNNASSTIELFLQNKTSGTFYLAGIEIIPVKSNYEEELTLEEAKKAVSSLFTDARNALKIDVTDYQIDQAANLVECISGDLYAKEKIVLLRAVKFAKQLSQSQNLLSDPEFNNVNRENSWTASTSVAIIEGDPLYKGRAVQLSSARDENFPTYLYQKIDESTLKPYTRYQLRGFVEGSENLDVYLIRYGAAHVRMNVPYNLEIIDTSSPVNPCEEVDGLSHRSCNVFDRCKQSISVAPDANTGPDQIDGDPHAFSFHIDTGTVDSTENLGIWVAFKISELDGSAIFGNLELIEVGPLSGEALAQVQRKEEKWKQVLAKKRETTAQTVCSGEASQLTNSSQILKIRNYDLIQNFRIFSLRNTLSIKFKIYTITNYPYSRLNYDLFMELENRIQNASLYMTSNILQNGGFKSDVTSWETTANAEVQQIDGASVLVLSNWNASVAQSVNVQNDHGYVLRVTAKKEGIGNGYVTILDCANHIDTLTFSACRSDSDTSSNELTAYVTKTLEIFPDTEQIRIEIGETEGMFYVESVELIRMEN

SEQ ID NO: 246 - protein, 826 aa, Bacillus thuringiensis higo
MNPYQNKNEYEILDAKRNNCHMSNGYPRHPLANDPQMYLRNAHYKDWLSMCNKNNPVGLIPPESFEWTWLNGTVAALTIVSVIAGILVTAPVSVTAGLITVLGAGAALLAGITPLIWPATTDNTFNKITDATEVLLNKEISEFVRKTANTKIDSLQQLIYYYQNALENWKKNPNDSAARNTVSTRFQIVNAFFVEAMPALSMPGYEVVQLGAYAQAANLHLILLREGIAYADQWNLARDPMHAAGDLHYKEFLDYRNQYINHCSTWYNEGQNEANLKNNGLVYQRTMTLFVLDLIAMFSTYDPRLYTMPIKTEILTRTIYTDGVNRNEPKSIHNPGLFRRLEQMKLHIYEYQGAQFLSGHQNIFRSMNYNHPLIYGPVQGYSSSNINKITTINLGDYDKIYSINTESRNRLVQGSTTFDKINFYGAFNENWLFSVYNQNGPIIKHSNIPGIDAPSTGLNYSNYTHYLSNCIFQSNRNGGSAPDYNTQSYVFGWNHYTIDPTGNYVTDAFEVNKNLPESRYVPQISQVPAVKASDIFNPGRVVNAKVESGPYFTGGDVIVSKAQLDGSGLARTLITFPIIPKRYRASGFRVRMYYAANHTGQVSYGVANINTTGYANFQKTFDGWEYFRARHEHFKYIEFDTTFSLRNSGQLEEHLLHIYYPNTTKISGDQLLIIDKIEFIPVGIPLNQTSEGYNTYDQNTNSYNQNYNNYNQNMDTTYQPNYDNYKQNSSGMYDNPYNQNPKDSYNQNYTDTYDSGYNNSQNVGSNYNQEYNTYNQDTENMYNQSYNNYNSDNNNYNQNSDCMCSPGYNGNYECRCNQRANGNYPK

SEQ ID NO: 247 - protein, 1109 aa, Bacillus thuringiensis finitimus B-1161
MAQTYYKIGVQSTEVNSESIFFNPEVDSSDTVAVVSAGIVVVGTILTAFASFVNPGVVLISFGTLAPVLWPDPEEDPKKIWSQFMKHGEDLLNQTISTAVKEIALAHLNGFKDVLTYYERAFNDWKRNPSANTARLVSQRFENAHFNFVSNMPQLQLPTYDTLLLSCYTEAANLHLNLLHQGVQFADQWNADQPHSPMLKSSGTYYDELLVYIEKYINYCTKTYHKGLNHLKESEKITWDAYNTYRREMTLIVLDLVATFPFYDIRRFPRGVELELTREVYTSLDHLTRPPGLFTWLSDIELYTESVAEGDYLSGIRESKYYTGNQFFTMKNIYGNTNRLSKQLITLLPGEFMTHLSINRPFQTIAGINKLYSLIQKIVFTTFKNDNEYQKNFNVNNQNEPQETTNYPNDYGGSNSQKFKHNLSHFPLIIHKLEFAEYFHSIFALGWTHNSVNSQNLISESVSTQIPLVKAYEVTNNSVIRGPGFTGGDLIELRDKCSIKCKASSLKKYAISLFYAANNAIAVSIDVGDSGAGVLLQPTFSRKGNNNFTIQDLNYKDFQYHTLLVDIELPESEEIHIHLKREDDYEEGVILLIDKLEFKPIDENYTNEMNLEKAKKAVNVLFINATNALKMDVTDYHIDQVANLVECISDDLYAKEKIKFTPCIKFAKQLSQARNLLSDPNFNNLNAENSWTANTGVTIIEGDPLYKGRAIQLSAARDENFPTYLYQKIDESLLKPYTRYQLRGFVEGSQDLELDLVRYGATDIVMNVPGDLEILSYSAPINPCEEIETRLDTTCGALDRCKQSNYVNSAADVRPDQVNGDPHAFSFHIDTGTTDNNRNLGIWIIFKIATPDGYATFGNLELIELGPLSGEALAQVQRKEQKWGKNTTQKREEAAKLYAAAKQTINQLFADSQGTKLRFDTEFSNILSADKLVYKIRDVYSEVLSVIPGLNYDLFMELENRIQNAIDLYDARNTVTNGEFRNGLANWMASSNTEVRQIQAHPCWYSLGWNAQVAQSLNVKPDHGYVLRVTAKKEGIGNGYVTILDCANHIDTLTFSSCDSGFTTSSNELAAYVTKTLEIFPDTDQIRIEIGETRSTFYVESVDLIRMED

SEQ ID NO: 248 - protein, 1128 aa, Bacillus thuringiensis finitimus
MDKHINKIGVQSTEVNSESIFFNPEVDSSDTVAVVSAGIVVVGTILTAFASFVNPGVVLISFGTLAPVLWPDPEEDPKKIWSQFMKHGEDLLNQTISTAVKEIALAHLNGFKDVLTYYERAFNDWKRNPSANTARLVSQRFENAHFNFVSNMPQLQLPTYDTLLLSCYTEAANLHLNLLHQGVQFADQWNADQPHSPMLKSSGTYYDELLVYIEKYINYCTKTYHKGLNHLKESEKITWDAYNTYRREMTLIVLDLVATFPFYDIRRFPRGVELELTREVYTSLDPPGLNAGPIPEIDFSYLEDHLTRPPGLFTWLSDIELYTESVAEGDYLSGIRESKYYTGNQFFTMKNIYGNTNRLSKQLITLLPGEFITHLSINRGFQTIAGINKLYSLIQKIVFTTFKNDNEYQKNFNVNNQNEPQETTNYPNDYGGSNSQKFKHNLSHFPLIIHQVEFAEYFHSIFALGWTHNSVNSQNLISESVSTQIPLVKAYEVTTNSVIRGPGFTGGDLIELRDKCSIKCKASSLKKYAISLFYAANNAIAVSIDVGDSGAGVLLQPTFSRKGNNNFTIQDLNYKDFQYHTLLVDIELPESEEIHIHLKREDDYEEGVILLIDKLEFKPIDENYTNEMNLEKAKKAVNVLFINATNALKMDVTDYHIDQVANLVECISDDLYAKEKIKLLHAIKFAKQLSQARNLLSDPNFNNLNAENSWTANTGVTIIEGDPLYKGRAIQLSAARDENFPTYLYQKIDESLLKPYTRYQLRGFVEGSQDLELDLVRYGATDIVMNVPGDLEILSYSAPINPCEEIETRLDTTCGALDRCKQSNYVNSAADVRPDQVNGDPHAFSFHIDTGTTDNNRNLGIWIIFKIATPDGYATFGNLELIELGPLSGEALAQVQRKEQKWGKNTTQKREEAAKLYAAAKQTINQLFADSQGTKLRFDTEFSNILSADKLVYKIRDVYSEVLSVIPGLNYDLFMELENRIQNAIDLYDARNTVTNGEFRNGLANWMASSNTEVRQIQDTSVLVLSSWNAQVAQSLNVKPDHGYVLRVTAKKEGIGNGYVTILDCANHIDTLTFSSCDSGFTTSSNELAAYVTKTLEIFPDTDQIRIEIGETEGTFYVESVDLIRMED

SEQ ID NO: 249 - protein, 650 aa, Bacillus thuringiensis medellin
MNSFQNKNEYEILNAPSSISNIPNNYSKYPIANTLNQTMQNTNYKDWTNMCAIDNNLKSINPFEANLQNSLVGLFAITAAIASLLSAPITGGTSIAAGTAIAAAIIPILWPSQENNLPDKLLAISEATLYSFQDQRVREDALTRLESLKDSVKYFENAFTFWINNPNSTNTTTVRERFQEVNGRFVGSMAFFRAKNYEPILLSTYAQAARLHLLHLRDGITYAEKWNLSRQGDDMPGDLLYKEFNKYCNEYIEHCIKWYNESLSLLKSVGANWLEYNQYRTFLTASVLDVISLFSSYDPRLYKERLSVEILTRKLYTDPINYHRGISLEADESKYTLEPTLFTQLYTLTFYSNIFYNYMGHTNTYRYLSPDKIFAERSFGKQSSYIDKVPVIPNDKSIIYKIRAYDNHNGLFNVMYFGFWDGEKDQIQKIIGGSSTEIYIKNCTHRLADVISHDLDEKNKCYSFAWTSTTISLENEIKNDIITQIPAVKAYQLGVQSQVIKGPGHTGGDLINLKSNDYLRISCQHLSNVTKKYFVRIRYATNGSLNTRPIINITIPGMTPQGMVLDNTFSGTGYSNLEYQNFGYKEFLKEVTLNPNQSISLTLNRSDQNSNSILLLDRIEFLPITPSIRKSKEQQNLEKNQKTVNKLFFN

SEQ ID NO: 250 - protein, 633 aa, Bacillus thuringiensis kurstaki
MNNVLNSGRTTICDAYNVVAHDPFSFEHKSLDTIQKEWMEWKRTDHSLYVAPVVGTVSSFLLKKVGSLIGKRILSELWGIIFPSGSTNLMQDILRETEQFLNQRLNTDTLARVNAELIGLQANIREFNQQVDNFLNPTQNPVPLSITSSVNTMQQLFLNRLPQFQIQGYQLLLLPLFAQAANMHLSFIRDVILNADEWGISAATLRTYRDYLRNYTRDYSNYCINTYQTAFRGLNTRLHDMLEFRTYMFLNVFEYVSIWSLFKYQSLMVSSGANLYASGSGPQQTQSFTAQNWPFLYSLFQVNSNYILSGISGTRLSITFPNIGGLPGSTTTHSLNSARVNYSGGVSSGLIGATNLNHNFNCSTVLPPLSTPFVRSWLDSGTDREGVATSTNWQTESFQTTLSLRCGAFSARGNSNYFPDYFIRNISGVPLVIRNEDLTRPLHYNQIRNIESPSGTPGGARAYLVSVHNRKNNIYAANENGTMIHLAPEDYTGFTISPIHATQVNNQTRTFISEKFGNQGDSLRFEQSNTTARYTLRGNGNSYNLYLRVSSIGNSTIRVTINGRVYTVSNVNTTTNNDGVNDNGARFSDINIGNIVASDNTNVTLDINVTLNSGTPFDLMNIMFVPTNLPPLY

SEQ ID NO: 251 - protein, 633 aa, Bacillus thuringiensis; identical to SEQ ID NO: 250

SEQ ID NO: 252 - protein, 635 aa, Bacillus thuringiensis
MNNVLNSGKTTICNAYNVVAHDPFSFEHKSLDTIQEEWMEWKRTDHSLYVAPVVGTVSSFLLKKVGSLIGKRILSELWGLIFPSGSTNLMQDILRETEQFLNQRLNTDTLDRVNAELEGLQANIREFNQQVDNFLNPTQNPVPLSITSSVNTMQQLFLNRLPQFQIQGYQLLLLPLFAQAANMHLSFIRDVILNADEWGISAATLRTYRDYLRNYTRDYSNYCINTYQTAFRGLNTRLHDMLEFRTYMFLNVFEYVSIWSLFKYQSLMVSSGANLYASGSGPQQTQSFTAQNWPFLYSLFQVNSNYILSGISGNRLSTTFPNIGGLPGSTTIHSLNSARVNYSGGVSSGLIGATNLNHNFNCSTVLPPLSTPFVRSWLDSGTDREGVATSTTWQTESFQITSGLRCGAFPFSARGNSNYFPDYFIRNISGVPLVIRNEDLTRPLHYNQIRNIESPSGTPGGLRAYMVSVHNRKNNIYAAHENGTMIHLAPEDYTGFTISPIHATQVNNQTRTFISEKFGNQGDSLRFEQSNTTARYTLRGNGNSYNLYLRVSSIGNSTIRVTINGRVYTASNVNTNTNNDGVNDNGARFSDINIGNVVASDNTNVPLDINVTLNSGTQFELMNIMFVPTNLPPLY

SEQ ID NO: 253 - protein, 633 aa, Bacillus thuringiensis Rpp39
MNNVLNSGRTTICDAYNVVAHDPFSFEHKSLDTIQKEWMEWKRTDHSLYVAPVVGTVSSFLLKKVGSLIGKRILSELWGIIFPSGSTNLMQDILRETEQFLNQRLNTDTLARVNAELIGLQANIREFNQQVDNFLNPTQNPVPLSITSSVNTMQQLFLNRLPQFQIQGYQLLLLPLFAQAANMHLSFIRDVILNADEWGISAATLRTYRDYLRNYTRDYSNYCINTYQTAFRGLNTRLHDMSEFRTYMFLNVFEYVSIWSLFKYQSLMVSSGANLYASGSGPQQTQSFTAQNWPFLYSLFQVNSNYILSGISGTRLSITFPNIGGLPGSTTTHSLNSARVNYSGGVSSGLIGATNLNHNFNCSTVLPPLSTPFVRSWLDSGTDREGVATSTNWQTESFQTTLSLRCGAFSARGNSNYFPDYFIRNISGVPLVIRNEDLTRPLHYNQIRNIESPSGTPGGARAYLVSVHNRKNNIYAANENGTMIHLAPEDYTGFTISPIHATQVNNQTRTFISEKFGNQGDSLRFEQSNTTARYTLRGNGNSYNLYLRVSSIGNSTIRVTINGRVYTVSNVNTTTNNDGVNDNGARFSDINIGNIVASDSTNVTLDINVTLNSGTPFDLMNIMFVPTNLPPLY

SEQ ID NO: 254 - protein, 633 aa, Bacillus thuringiensis 146-158-01
MNSVLNSGRTTICDAYNVAAHDPFSFQHKSLDTVQKEWTEWKKNNHSLYLDPIVGTVASFLLKKVGSLVGKRILSELRNLIFPSGSTNLMQDILRETEKFLNQRLNTDTLARVNAELTGLQANVEEFNRQVDNFLNPNRNAVPLSITSSVNTMQQLFLNRLPQFQMQGYQLLLLPLFAQAANLHLSFIRDVILNADEWGISAATLRTYRDYLKNYTRDYSNYCINTYQSAFKGLNTRLHDMLEFRTYMFLNVFEYVSIWSLFKYQSLIVSSGANLYASGSGPQQTQSFTAQNWPFLYSLFQVNSNYILSGISGTRLSITFPNIGGLPGSTTTHSLNSARVNYSGGVSSGLIGATNLNHNFNCSTVLPPLSTPFVRSWLDSGTDREGVATSTNWQTESFQTTLSLRCGAFSARGNSNYFPDYFIRNISGVPLVIRNEDLTRPLHYNQIRNIESPSGTPGGARAYLVSVHNRKNNIYAANENGTMIHLAPEDYTGFTISPIHATQVNNQTRTFISEKFGNQGDSLRFEQSNTTARYTLRGNGNSYNLYLRVSSIGNSTIRVTINGRVYTVSNVNTTTNNDGVNDNGARFSDINIGNIVASDNTNVTLDINVTLNSGTPFDLMNIMFVPTNLPPLY

SEQ ID NO: 255 - protein, 633 aa, Bacillus thuringiensis HD-550
MNSVLNSGRTTICDAYNVVAHDPFSFEHKSLDTIQKEWMEWKRTDHSLYVAPVVGTVSSFLLKKVGSLFGKRILSELWGIIFPSGSTNLMQDILRETEQFLNQRLNTDTLARVNAELIGLQANIREFNQQVDNFLNPTQNPVPLSITSSVNTMQQLFLNRLPQFQIQGYQLLLLPLFAQAANMHLSFIRDVILNADEWGISAATLRTYRDYLRNYTRDYSNYCINTYQTAFRGLNTRLHDMLEFRTYMFLNVFEYVSIWSLFKYQSLMVSSGANLYASGSGPQQTQSFTAQNGPFLYSLFQVNSNYILSGISGTRLSITFPNIGGLPGSTTTHSLNSARVNYSGGVSSGLIGATNLNHNFNCSTVLPPLSTPFVRSWLDSGTDREGVATSTNWQTESFQTTLSLRCGAFSARGNSNYFPDYFIRNISGVPLVIRNEDLTRPLHYNQIRNIESPSGTPGGARAYLVSVHNRKNNIYAANENGTMIHLAPEDYTGFTISPIHATQVNNQTRTFISEKFGNQGDSLRFEQSNTTARYTLRGNGNSYNLYLRVSSIGNSTIRVTINGRVYTVSNVNTTTNNDGVNDNGARFSDINIGNIVASDNTNVTLDINVTLNSGTPFDLMNIMFAPTNLPPLY

SEQ ID NO: 256 - protein, 633 aa, Bacillus thuringiensis kurstaki HD1; identical to SEQ ID NO: 250

SEQ ID NO: 257 - protein, 635 aa, Bacillus thuringiensis sotto
MNNVLNSGKTTICNAYNVVAHDPFSFEHKSLDTIQEEWMEWKRTDHSLYVAPVVGTVSSFLLKKVGSLIGKRILSELWGLIFPSGSTNLMQDILRETEQFLNQRLNTDTLDRVNAELEGLQANIREFNQQVDNFLNPTQNPVPLSITSSVNTMQQLFLNRLPQFQIQGYQLLLLPLFAQAANMHLSFIRDVILNADEWGISAATLRTYRDYLRNYTRDYSNYCINTYQTAFRGLNICLHDMLEFRTYMFLNVFEYVSIWSLFKYQSLMVSSGANLYASGSGPQQTQSFTAQNWPFLYSLFQVNSNYILSGISGNRLSTTFPNIGGLPGSTTIHSLNSARVNYSGGVSSGLIGATNLNHNFNCSTVLPPLSTPFVRSWLDSGTDREGVATSTTWQTESFQITSGLRCGAFPFSARGNSNYFPDYFIRNISGVPLVIRNEDLTRPLHYNQIRNIESPSGTPGGLRAYMVSVHNRKNNIYAAHENGTMIHLAPEDYTGFTISPIHATQVNNQTRTFISEKFGNQGDSLRFEQSNTTARYTLRGNGNSYNLYLRVSSIGNSTIRVTINGRVYTASNVNTNTNNDGVNDNGARFSDINIGNVVASDNTNVPLDINVTLNSGTQFELMNIMFVPTNLPPLY

SEQ ID NO: 258 - protein, 633 aa, Bacillus thuringiensis kenyae HD549
MNSVLNSGRTTICDAYNVVAHDPFSFEHKSLDTIQKEWMEWKRTDHSLYVAPVVGTVSSFLLKKVGSLIGKRILSELWGIIFPSGSTNLMQDILRETEQFLNQRLNTDTLARVNAELIGLQANIREFNQQVDNFLNPTQNPVPLSITSSVNTMQQLFLNRLPQFQIQGYQLLLLPLFAQAANMHLSFIRDVILNADEWGISAATLRTYRDYLRNYTRDYSNYCINTYQTAFRGLNTRLHDMLEFRTYMFLNVFEYVSIWSLFKYQSLMVSSGANLYASGSGPQQTQSFTAQNWPFLYSLFQVNSNYILSGISGTRLSITFPNIGGLPGSTTTHSLNSARVNYSGGVSSGLIGATNLNHNFNCSTVLPPLSTPFVRSWLDSGTDREGVATSTNWQTESFQTTLSLRCGASSARGNSNYFPDYFIRNISGVPLVIRNEDLTRPLHYNQIRNIESPSGTPGGARAYLVSVHNRKNNIYAANENGTMIHLAPEDYTGFTISPIHATQVNNQTRTFISEKFGNQGDSLRFEQSNTTARYTLRGNGSSYNLYLRVSSIGNSTIRVTINGRVYTVSNVNTTTNNDGVNDNGARFPDINIGNIVASDNTNVTLDINVTLNSGTPFDLMNIMFVPTNLPPLY

SEQ ID NO: 259 - protein, 633 aa, Bacillus thuringiensis SL39
MNNVLNSRRTTICDAYNVVAHDPFSFEHKSLDTIQKEWMEWKRTDHSLYVAPVVGTVSSFLLKKVGSLIGKRILSELWGIIFPSSSTNLMQDILRETEQFLNQRLNTDTLARVNAELIGLQANIREFNQQVDNFLNPTQNPVPLSITSSVNTMQQLFLNRLPQFQIQGYQLLLLPLFAQAANMHLSFIRDVILNADEWGISAATLRTYRDYLRNYTRDYSNYCINTYQTAFRGLNTRLHDMLEFRTYMFLNVFEYVSIWSLFKYQSLMVSSGANLYASGGGPQQTQSFTAQNWPFLYSLFQVNSNYILSGISGTRLSITFPNIGGLPGSTTTHSLNSARVNYSGGVSSGLIGATNLNHNFNCSTVLPPLSTPFVRSWLDSGTDREGVATSTNWQTESFQTTLSLRCGAFSARGNSNYFPDYFIRNISGVPLVIRNEDLTRPLHYNQIRNIESPSGTPGGARAYLVSVHNRKNNIYAANENGTMIHLAPEDYTGFTISPIHATQVNNQTRTFISEKFGNQGDSLRFEQSNTTARHTLRGNGNSYNLYLRVSSIGNSTIRVTINGRVYTVSNVNTTTNNDGVNDNGARFSDINIGNIVASDNTNVTLDINVTLNSGTPFDLMNIMFVPTNLPPLY

SEQ ID NO: 260 - protein, 633 aa, Bacillus thuringiensis YZ71
MNNVLNSGRTTICDAYNVVAHDPFSFEHKSLDTIQKEWMEWRRTDHSLYVAPVVGTVSSFLLKKVGSLIGKRILSELWGIIFPSGSTNLMQDILRETEQFLNQRLNTDTLARVNAELIGLQANIREFNQQVDNFLNPTQNPAPLSITSSVNTMQQLFLNRLPQFQIQGYQLLLLPLFAQAANMHLSFIRDVILNADEWGISAATLRTYRDYLRNYTRDYSNYCINTYQTAFRGLNTRLHDMLEFRTYMFLNVFEYVSIWSLFKYQSLMVSSGANLYASGSGPQQTQSFTAQNWPFLYSLFQVNSNYILSGISGTRLSITFPNIGGLPGSTTTHSLNSARVNYSGGVSSGLIGATNLNHNFNCSTVLPPLSTPFVRSWLDSGTDREGVATSTNWQTESFQTTLSLRCGAFSARGNSNYFPDYFIRNISGVPLVIRNEDLTRPLHYNQIRNIESPSGTPGGARAYLVSVHNRKDNIYAANENGTMIHLAPEDYTGFTISPIHATQVNNQTRTFISEKFGNQGDSLRFEQSNTTARYTLRGNGNSYNLYLRVSSIGNSTIRVTINGRVYTVSNVNTTTNNDGVNDNGARFSDINIGNIVASDNTNVTLDINVTLNSGTPFDLMNIMFVPTNPPPLY

SEQ ID NO: 261 - protein, 551 aa, Bacillus thuringiensis CY29
MNNVLNSRRTTICDAYNVVAHDPFSFEHKSLDTIQKEWMEWKRTDHSLYVAPVVGTVSSFLLKKVGSLIGKRILSELWGIIFPSSSTNLMQDILRETEQFLNQRLNTDTLARVNAELIGLQANIREFNQQVDNFLNPTQNPVPLSITSSVNTMQQLFLNRLPQFQIQGYQLLLLPLFAQAANMHLSFIRDVILNADEWGISAATLRTYRDYLRNYTRDYSNYCINTYQTAFRGLNTRLHDMLEFRTYMFLNVFEYVSIWSLFKYQSLMVSSGANLYASGGGPQQTQSFTAQNWPFLYSLFQVNSNYILSGISGTRLSITFPNIGGLPGSTTTHSLNSARVNYSGGVSSGLIGATNLNHNFNCSTVLPPLSTPFVRSWLDSGTDREGVATSTNWQTESFQTTLSLRCGAFSARGNSNYFPDYFIRNISGVPLVIRNEDLTRPLHYNQIRNIESPSGTPGGARAYLVSVHNRKNNIYAANENGTMIHLAPEDYTGFTISPIHATQVNNQTRTFISEKFGNQGDSLRFEQSNTTARHTLRGNGNSYNLYLRVSS

SEQ ID NO: 262 - protein, 633 aa, Bacillus thuringiensis Dongbei 66
MNNVLNSGRTTICDAYNVVAHDPFSFEHKSLDTIQKEWMEWKRTDHSLYVAPVVGTVSSFLLKKVGSLIGKRILSELWGIIFPSGSTNLMQDILRETEQFLNQRLNTDTLARVNAELIGLQANIREFNQQVDNFLNPTQNPVPLSITSSVNTMQQLFLNRLPQFQIQGYQLLLLPLFAQAANMHLSFIRDVILNADEWGISAATLRTYRDYLRNYTRDYSNYCINTYQTAFRGLNTRLHDMLEFRTYMFLNVFEYVSIWSLFKYQGLMVSSGANLYASGSGPQQTQSFTAQNWPFLYSLFQVNSNYILSGISGTRLSITFPNIGGLPGSTTTHSLNSARVNYSGGVSSGLIGATNLNHNFNCSTVLPPLSTPFVRSWLDSGTDREGVATSTNWQTESFQTTLSLRCGAFSARGNSNYFPDYFIRNISGVPLVIRNEDLTRPLHYNQIRNIESPSGTPGGARAYLVSVHNRKNNIYAANENGTMIHLAPEDYTGFTISPIHATQVNNQTRTFISEKFGNQGDSLRFEQSNTTARYTLRGNGNSYNLYLRVSSIGNSTIRVTINGRVYTVSNVNTTTNNDGVNDNGARFSDINIGNIVASDNTNVTLDINVTLNSGTPFDLMNIMFVPTNLPPLY

SEQ ID NO: 263 - protein, 633 aa, Bacillus thuringiensis; identical to SEQ ID NO: 250

SEQ ID NO: 264 - protein, 633 aa, Bacillus thuringiensis kurstaki HD1
MNSVLNSGRTTICDAYNVAAHDPFSFQHKSLDTVQKEWTEWKKNNHSLYLDPIVGTVASFLLKKVGSLVGKRILSELRNLIFPSGSTNLMQDILRETEKFLNQRLNTDTLARVNAELTGLQANVEEFNRQVDNFLNPNRNAVPLSITSSVNTMQQLFLNRLPQFQMQGYQLLLLPLFAQAANLHLSFIRDVILNADEWGISAATLRTYRDYLKNYTRDYSNYCINTYQSAFKGLNTRLHDMLEFRTYMFLNVFEYVSIWSLFKYQSLLVSSGANLYASGSGPQQTQSFTSQDWPFLYSLFQVNSNYVLNGFSGARLSNTFPNIVGLPGSTTTHALLAARVNYSGGISSGDIGASPFNQNFNCSTFLPPLLTPFVRSWLDSGSDREGVATVTNWQTESFETTLGLRSGAFTARGNSNYFPDYFIRNISGVPLVVRNEDLRRPLHYNEIRNIASPSGTPGGARAYMVSVHNRKNNIHAVHENGSMIHLAPNDYTGFTISPIHATQVNNQTRTFISEKFGNQGDSLRFEQNNTTARYTLRGNGNSYNLYLRVSSIGNSTIRVTINGRVYTATNVNTTTNNDGVNDNGARFSDINIGNVVASSNSDVPLDINVTLNSGTQFDLMNIMLVPTNISPLY

SEQ ID NO: 265 - protein, 633 aa, Bacillus thuringiensis CMBL-BT1
MNTVLNNGRTTICDAYNVAAHDPFSFQHKSLDTVQKEWTEWKKNNHSLYLDPIVGTVASFLLKKVGSLVGKRILSELRNLIFPSGSTNLMQDILRETEKFLNQRLNTDTVARVNAELTGLQANVEEFNRQVDNFLNPNRNAVPLSITSSVNTMQQLFLNRLPQFQMQGYQLLLLPLFAQAANLHLSFIRDVILNADEWGISAATLRTYRDYLKNYTRDYSNYCINTYQSAFKGLNTRLHDMLEFRTYMFLNVFEYVSIWSLFKYQSLLVSSGANSYASGSGPQQTQSFTSQDWPFLYSLFQVNSNYVLNGFSGARLSNTFPNIVGLPGSTTTHALLAARVNYSGGISSGDIGASPFNQNFNCSTFLPPLLTPFVRSWLDSGSDREGVATVTNWQTESFETTLGLRSGAFTARGISNYFPDYFIRNISGVPLVVRNEDLRRPLHYNEIRNIASPSGTPGGARAYMVSVHNRKNNIHAVHENGSMIHLAPNDYTGFTISPIHATQVNNQTRTFISEKFGNQGDSLRFEQNNTTARYTLRGNGNSYNLYLRVSSIGNSTIRVTINGRVYTATNVNTTTNNDGVNDNGARFSDINIGNVVASSNSDVPLDINVTLNSGTQFDLMNIMLVPTNLPPLY

SEQ ID NO: 266 - protein, 633 aa, Bacillus thuringiensis LyD
MNSVLNSGRTTICDAYNVAAHDPFSFQHKSLDTVQKEWTEWKKNNHSLYLDPIVGTVASFLLKKVGSLVGKRILSELRNLIFPSGSTNLMQDILRETEKFLNQRLNTDTLARVNAELTGLQANVEEFNRQVDNFLNPNRNAVPLSITSSVNTMQQLFLNRLPQFQMQGYQLLLLPLFAQAANLHLSFIRDVILNADEWGISAATLRTYRDYLKNYTRDYSNYCINTYQSAFKGLNTRLHDMLEFRTYMFLNVFEYVSFWSVFKYQSLLVSSGANLNARGRGPQQAQSFTSPGWAFLNSLFQVNSNYVFNGFRGARLFNSFPNIIGLPGFTTTHPLLAAKVNYKGRISSGDIGASPVNQNFNCSKFLPPLLTPFVRSWLDSGSDREGVATVTNWQTESFETTLGLRSGAFTARGNSNYFPDYFIRNISGVPLVVRNEDLRRPLHYNEIRNIASPSGTPGGARAYMVSVHNRKNNIHAVHENGSMIHLAPNDYTGFTISPIHATQVNNQTRTFISEKFGNQGDSLRFEQNNTTARYTLRGNGNSYNLYLRVSSIGNSTIRVTINGRVYTATNVNTTTNNDGVNDNGARFSDINIGNVVARSNSDVSLDINVSLNSRTLIDLMNIMLVPTNISPLY

SEQ ID NO: 267 - protein, 633 aa, Bacillus thuringiensis ywc5-4
MNSVLNIGRTTICDAYNVAAHDPFSFQHKSLDTVQKEWTEWKKNNHSLYLDPIVGTVASFLLKKVGSLVGKRILSELRNLIFPSGSTNLMQDILRETEKFLNQRLNTDTLARVNAELTGLQANVEEFNRQVDNFLNPNRNAVPLSITSSVNTMQQLFLNRLPQFQMQGYQLLLLPLFAQAANLHLSFIRDVILNADEWGISAATLRTYRDYLKNYTRDYSNYCINTYQSAFKGLNTRLHDMLEFRTYMFLNVFEYVSIWSLFKYQSLLVSSGANLYASGSGPQQTQSFTSQDWPFLYSLFQVNSNYVLNGFSGARLSNTFPNIVGLPGSTTTHALLAARVNYSGGISSGDIGASPFNQNFNCSTFLPPLLTPFVRSWLDSGSDREGVATVTNWQTESFETTLGLRSGAFTARGNSNYQSDYFIRNISGVPLVVRNEDLRRPLHYNEIRNIASPSGTPGGARAYLVSVHNRKNNIHAVHENGSLIHLAPNDYTGFTISPIHATQVNNQTRTFISEKFGNQGDSLRFEQNNTTARYTLRGNGNSYNLYLRVSSIGNSTIRVTINGRVYTATTVNTTTNNDGVNDNGARFSDINIGNVVASSNSDVPLDINVTLNSGTQFDLMNIMLVPTNISPLY

SEQ ID NO: 268 - protein, 633 aa, Bacillus thuringiensis Bts
MNSVLNTGRTTICDAYNVAAHDPFSFQHKSLDTVQKEWTEWKKNNHSLYLDPIVGTVASFLLKKVGSLVGKRILSELRNLIFPSGSTNLMQDILRETEKFLNQRLNTDTLARVNAELTGLQADVEEFNRQVDNFLNPNRNAVPLSITSSVNTMQQLFLNRLPQFQMQGYQLLLLPLFAQAANLHLSFIRDVILNADEWGISAATLRTYRDYLKNYTRDYSNYCINTYQSAFKGLNTRLHDMLEFRTYMFLNVFEYVSIWSLFKYQSLLVSSGANLYASGSGPQQTQSFTSQDWPFLYSLFQVNSNYVLNGFSGARLSNTFPNIVGLPGSTTTHALLAARVNYSGGISSGDIGASPFNQNFNCSTFLPPLLTPFVRSWLDSGSDREGVATVTNWRTESFETTLGLRSGAFTARGNSNYYSDYFIRNISGVPLVVRNEDLRRPLHYNEIRNIASPSGTPGGARAYLVSVHNRKNNIHAVHENGSLIHLAPNDYTGFTISPIHATQVNNQTRTFISEKFGNQGDSLRFEQNNTTARYTLRGNGNSYNLYLRVSSIGNSTIRVTINGRVYTATTVNTTTNNDGVNDNGARFSNINIGNVVASSNSDVPLDINVTLNSGTQFDLMNTMLVPTNISPLY

SEQ ID NO: 269 - protein, 634 aa, Bacillus thuringiensis BF-4
MNSVLNSGRTTICDAYNVAAHDPFSFQHKSLDTVQKEWTEWKKNNHSLYLDPIVGTVASFLLKKVGSLVGKRILSELRNLIFPSGSTNLMQDILRETEKFLNQRLNTDTLARVNAELTGLQANVEEFNRQVDNFLNPNRNAVPLSITSSVNTMQQLFLNRLPQFQMQGYQLLLLPLFAQAANLHLSFIRDVILNADEWGISAATLRTYRDYLKNYTRDYSNYCINTYQSAFKGLNTRLHDMLEFRTYMFLNVFEYVSIWSLFKYQSLLVSSGANLYASGSGPQQTQSFTSQDWPFLYSLFQVNSNYVLNGFSGARLSNTFPNIVGLPGSTTTHALLAARVNYSGGISSGDIGASPFNQNFNCSTFLPPLLTPFVRSWLDSGSDREGVATVTNWQTESFETTLGLRSGAFTARGNSNYFPDYFIRNISGVPLVVRNEDLRRPLHYNEIRNIASPSGTPGGARAYMVSVHNRKNNIHAVHENGSMIHLAPNDYTGFTISPIHATQVNNQTRTFISEKFGNQGDSLRFEQNNTTARYTLRGNGNSYNLYLRVSSIGNSTIRVTINGRVYTATNVNTTTNNDGVNDNGARFSDINIGNVVASSNSECTSLDINVTLNSGTQFDLMNIMLVPTNISPLY

SEQ ID NO: 270 - protein, 633 aa, Bacillus thuringiensis SK-793; identical to SEQ ID NO: 264

SEQ ID NO: 271 - protein, 633 aa, Bacillus thuringiensis kurstaki HD1; identical to SEQ ID NO: 264

SEQ ID NO: 272 - protein, 633 aa, Bacillus thuringiensis; identical to SEQ ID NO: 264

SEQ ID NO: 273 - protein, 633 aa, Bacillus thuringiensis BTC002; identical to SEQ ID NO: 264

SEQ ID NO: 274 - protein, 633 aa, Bacillus thuringiensis B-Pr-88
MNSVLNSGRTTICDAYNVAAHDPFSFQHKSLDTVQKEWTEWKKNNHSLYLDPIVGTVASFLLKKVGSLVGKRILSELRNLIFPSGSTNLMQDILRETEKFLNQRLNTDTVARVNAELTGLQANVEEFNRQVDNFLNPNRNAVPLSITSSVNTMQQLFLNRLPQFQMQGYQLLLLPLFAQAANLHLSFIRDVILNADEWGISAATLRTYRDYLKNYTRDYSNYCINTYQSAFKGLNTRLHDMLEFRTYMFLNVFEYVSIWSLFKYQSLLVSSGANLYASGSGPQQTQSFTSQDWPFLYSLFQVNSNYVLNGFSGARLSNTFPNIVGLPGSTTTHALLAARVNYSGGISSGDIGASPFNQNFNCSTFLPPLLTPFVRSWLDSGSDREGVATVTNWQTESFETTLGLRSGAFTARGISNYFPDYFIRNISGVPLVVRNEDLRRPLHYNEIRNIASPSGTPGGARAYMVSVHNRKNNIHAVHENGSMIHLAPNDYTGFTISPIHATQVNNQTRTFISEKFGNQGDSLRFEQNNTTARYTLRGNGNSYNLYLRVSSIGNSTIRVTINGRVYTATNVNTTTNNDGVNDNGARFSDINIGNVVASSNSDVPLDINVTLNSGTQFDLMNIMLVPTNISPLY

SEQ ID NO: 275 - protein, 633 aa, Bacillus thuringiensis ly30
MNSVLNSGRTTICDAYNVAAHDPFSFQHKSLDTVQKEWTEWKKNNHSLYLDPIVGTVASFLLKKVGSLVGKRILSELRNLIFPSGSTNLMQDILRETEKFLNQRLNTDTLARVNAELTELQANVEEFNRQVDNFLNPNRNAVPLSITSSVNTMQQLFLNRLPQFQMQGYQLLLLPLFAQAANLHLSFIRDVILNADEWGISAATLRTYRDYLKNYTRDYSNYCINTYQSAFKGLNTRLHDMLEFRTYMFLNVFEYVSIWSLFKYQSLLVSSGANLYASGSGPQQTQSFTSQDWPFLYSLFQVNSNYVLNGFSGARLSNTFPNIVGLPGSTTTHALLAARVNYSGGISSGDIGASPFNQNFNCSTFLPPLLTPFVRSWLDSGSDREGVATVTNWQTESFETTLGLRSGAFTARGNSNYFPDYFIRNISGVPLVVRNEDLRRPLHYNEIRNIASPSGTPGGARAYMVSVHNRKNNIHAVHENGSMIHLAPNDYTGFTISPIHATQVNNQTRTFISEKFGNQGDSLRFEQNNTTARYTLRGNGNSYNLYLRVSSIGNSTIRVTINGRVYTATNVNTTTNNDGVNDNGARFSDINIGNVVASSNSDVPLDINVTLNSGTQFDLMNIMLVPTNISPLY

SEQ ID NO: 276 - protein, 633 aa, Bacillus thuringiensis WZ-7
MNSVLNSGRTTICDAYNVAAHDPFSFQHKSLDTVQKEWTEWKKNNHSLYLDPIVGTVASFLLKKVGSLVGKRILSELRNLIFPSGSTNLMQDILRETEKFLNQRLNTDTLARVNAELTGLQANVEEFNRQVDNFLNPNRNAVPLSITSSVNTMQQLFLNRLPQFQMQGYQLLLLPLFAQAANLHLSFIRDVILNADEWGISAATLRTYRDYLKNYTRDYSNYCINTYQSAFKGLNTRLHDMLEFRTYMFLNVFEYVSIWSLFKYQSLLVSSGANLYASGSGPQQTQSFTSQDWPFLYSLFQVNSNYVLNGFSGARLSNTFPNIVGLPGSTTTHALLAARVNYSGGISSGDIGASPFNQNFNCSTFLPPLLTPFVRSWLDSGSDREGVATVTNWQTESFETTLGLRSGAFTARGNSNYFPDYFIRNISGVPLVVRNEDLRRPLHYNGIRNIASPSGTPGGARAYMVSVHNRKNNIHAVHENGSMIHLAPNDYTGFTILPIHATQVNNQTRTFISGKFGNQGDSLRFEQNNTTARYTLRGNGNSYNLYLRVSSIGNSTIRVTINGRVYTATNVNTTTNNDGVNDNGARFSDINIGNVVASSNSDVPLDINVTLNSGTQFDLMNIMLVPTNISPLY

SEQ ID NO: 277 - protein, 633 aa, Bacillus thuringiensis WB2
MNSVLNSGRTTICDAYNVAAHDPFSFQHKSLDTVQKEWTEWKKNNHSLYLDPIVGTVASFLLKKVGSLVGKRILSELRNLIFPSGSTNLMQDILRETEKFLNQRLNTDTLARVNAELTGLQANVEEFNRQVDNFLNPNRNAVPLSITSSVNTMQQLFLNRLPQFQMQGYQLLLLPLFAQAANLHLSFIRDVILNADEWGISAATLRTYRDYLKNYTRDYSNYCINTYQSAFKGLNTRLHDMLEFRTYMFLNVFEYVSIWSLFKYQSLLVSSGANLYASGSGPQQTQSFTSQDWPFLYSLFQVNSNYVLNGFSGARLSNTFPNIVGLPGSTTTHALLAARVNYSGGISSGDIGASPFNQNFNCSTFLPPLLTPFVRSWLDSGSDREGVATVTNWQTESFETTLGLRSGAFTVRGNSNYFPDYFIRNISGVPLVVRNEDLRRPLHYNEIRNIASPSGTPGGARAYMVSVHNRKNNIHAVHENGSMIHLAPNDYTGFTISPIHATQVNNQTRTFISEKFGNQGDSLRFEQNNTTARYTLRGNGNSYNLYLRVSSIGNSTIRVTINGRVYTATNVNTTTNNDGVNDNGARFSDINIGNVVASSNSDVPLDINVTLNSGTQFDLMNIMLVPTNLPPLY

SEQ ID NO: 278 - protein, 633 aa, Bacillus thuringiensis LLB6
MNNVLNSGRTTICDAYNVAAHDPFSFQHKSLDTVQKEWTEWKKNNHSLYLDPIVGTVASFLLKKVGSLVGKRILSELRNIIFPSGSTNLMQDILRETEKFLNQRLNTDTVARVNAELTGLQANVEEFNRQVDNFLNPNRNAVPLSITSSVNTMQQLFLNRLPQFQMQGYQLLLLPLFAQAANLHLSFIRDVILNADEWGISAATLRTYRDYLKNYTRDYSNYCINTYQSAFKGLNTRLHDMLEFRTYMFLNVFEYVSIWSLFKYQSLLVSSGANLYASGSGPQQTQSFTSQDWPFLYSLFQVNSNYVLNGFSGARLSNTFPNIVGLPGSTTTHALLAARVNYSGGISSGDIGASPFNQNFNCSTFLPPLLTPFVRSWLDSGSDREGVATVTNWQTESFETTLGLRSGAFTARGISNYFPDYFIRNISGVPLVVRNEDLRRPLHYNEIRNIASPSGTPGGARAYMVSVHNRKNNIHAVHENGSMIHLAPNDYTGFTISPIHATQVNNQTRTFISEKFGNQGDSLRFEQNNTTARYTLRGNGNSYNLYLRVSSIGNSTIRVTINGRVYTATNVNTTTNNDGVNDNGARFSDINIGNVVASSNSDVPLDINVTLNSGTQFDLMNIMLVPTKLPPLY

SEQ ID NO: 279 - protein, 622 aa, Bacillus thuringiensis shanghai S1
MNTVLNNGRNTTCHAHNVVAHDPFSFEHKSLNTIEKEWKEWKRTDHSLYVAPIVGTVGSFLLKKVGSLVGKRILSELQNLIFPSGSIDLMQEILRATEQFINQRLNADTLGRVNAELAGLQANVAEFNRQVDNFLNPNQNPVPLAIIDSVNTLQQLFLSRLPQFQIQGYQLLLLPLFAQAANFNLSFIRGVILNADEWGISAATVRTYRDHLRKFHRDYSNYCINPYQTAFRGLNHRLPDMLEFRTYMFLNVFEYVSIWSLFKYQSLLVSSGANLYASGSGPTQSFTAQNWPFLYSLFQVNSNYVLNGLSGARTTITFPNIGGLPVYHNSTLHFARINYRGGVSSSRIGQANLNQNFNISTLFNPLQTPFIRSWLDSGTDREGVATSTNWQSGAFETTLLRFSIFSARGNSNFFPDYFIRNISGVVGTISNADLARPLHFNEIRDIGTTAVASLVTVHNRKNNIYDTHENGTMIHLAPNDYTGFTVSPIHATQVNNQIRTFISEKYGNQGDSLRFELSNPTARYTLRGNGNSYNLYLRVSSIGSSTIRVTINGRVYTANVNTTTNNDGVLDNGARFSDINIGNVVASANTNVPLDIQVTFNGNPQFELMNIMFVPTNLPPLY

SEQ ID NO: 280 - protein, 623 aa, Bacillus thuringiensis QCL-1
MNTVLNNGRNTTCHAPNVVAHDPFSFEHKSLNTIEKEWKEWKRTDHSLYVAPIVGTVGSFLLKKVGSLVGKRILSELQNLIFPSGSIDLMQEILRATEQFINQRLNADTLGRVNAELAGLQANVAEFNRQVDNFLNPNQNPVPLAIIDSVNTLQQLFLSRLPQFQIQGYQLLLLPLFAQAANLHLSFIRDVILNADEWGISAATVRTYRDHLRNFTRDYSNYCINTYQTAFRGLNTRLHDMLEFRTYMFLNVFEYVSIWSLFKYQSLLVSSGANLYASGSGPTQSFTAQNWPFLYSLFQVNSNYVLNGLSGARTTITFPNIGGLPGSTTTQTLHFARINYRGGVSSSRIGQANLNQNFNISTLFNPLQTPFIRSWLDSDTDREGVATSTNWQSGAFETTLLRFSIFSARGNSNFFPDYFIRNISGVVGTISNADLARPLHFNEIRDIGTTAVASLVTVHNRKNNIYDTHENGTMIHLAPNDYTGFTVSPIHATQVNNQIRTFISEKYGNQGDSLRFELSNTTARYTLRGNGNSYNLYLRVSSIGSSTIRVTINGRVYTANVNTTTNNDGVLDNGARFSDINIGNVVASANTNVPLDIQVTFNGNPQFELMNIMFVPTNLPPLY

SEQ ID NO: 281 - protein, 623 aa, Bacillus thuringiensis HD29
MNTVLNNGRNTTCHAHNVVAHDPFSFEHKSLNTIEKEWKEWKRTDHSLYVAPIVGTVGSFLLKKVGSLVGKRILSELQNLIFPSGSIDLMQEILRATEQFINQRLNADTLGRVNAELAGLQANVAEFNRQVDNFLNPNQNPVPLAIIDSVNTLQQSFLSRLPQFQIQGYQLLLLPLFAQAANLHLSFIRDVILNADEWGISAATVRTYRDHLRNFTRDYSNYCINTYQTAFRGLNTRLHDMLEFRTYMFLNVFEYVSIWSLFKYQSLLVSSGANLYASGSGPTQSFTAQNWPFLYSLFQVNSNYVLNGLSGARTTITFPNIGGLPGSTTTQTLHFARINYRGGVSSSRIGQANLNQNFNISTLFNPLQTPFIRSWLDSGTDREGVATSTNWQSGAFETTLLRFSIFSARGNSNFFPDYFIRNISGVVGTISNADLARPLHFIEIRDIGTTAVASLVTVHNRKNNIYDTHENGTMIHLAPNDYTGFTVSPIHATQVNNQIRTFISEKYGNQGDSLRFELSNTTARYTLRGNGNSYNLYLRVSSIGSSTIRVTINGRVYTANVNTTTNNDGVLDNGARFSDINIGNVVASANTNVPLDIQVTFNGNPQFELMNIMFVPTNLPPLY

SEQ ID NO: 282 - protein, 623 aa, Bacillus thuringiensis CMBL-BT3
MNTVLNNGRNTTCHAHNVVAHDPFSFEHKSLNTIEKEWKEWKRTDHSLYVAPIVGTVGSFLLKKVGSLVGKRILSELQNLIFPSGSIDLMQEILRATEQFINQRLNADTLGRVNAELAGLQANVAEFNRQVDNFLNPNQNPVPLAIIDSVNTLQQLFLSRLPQFQIRGYQLLLLPLFAQAANLHLSFIRDVILNADEWGISAATVRTYRDHLRNFTRDYSNYCINTYQTAFRGLNTRLHDMLEFRTYMFLNVFEYVSIWSLFKYQSLLVSSGANLYASSSGPTQSFTAQNWPFLYSLFQVNSNYVLNGLSGARTTITFPNIGGLPGSTTTQTLHVARINYRGGVSSSRIGQANLNQNFNISTLFNPLQTPFIRSWLDSGTDREGVATSTNWQSGAFETTLLRFSIFSARGNSNFFPDYFIRNISGVVGTISNADLARPLHFNEIRDIGTTAVASLVTVHNRKNNIYDTHENGTMIHLAPNDYTGFTVSPIHATQVNNQIRTFISEKYGNQGDSLRFELSNTTARYTLRGNGNSYNLYLRVSSIGSSTIRVTINGRVYTANVNTTTNNDGVLDNGARFSDINIGNVVASANTNVPLDIQVTFNGNPQFELMNIMFVPTNLPPLY

SEQ ID NO: 283 - protein, 623 aa, Bacillus thuringiensis
MNTVLNNGRNTTCHAHNVVAHDPFSFEHKSLNTIEKEWKEWKRTDHSLYVAPIVGTVGSFLLKKVGSLVGKRILSELQNLIFPSGSIDLMQEILRATEQFINQRLNADTLGRVNAELAGLQANVAEFNRQVDNFLNPNQNPVPLAIIDSVNTLQQLFLSRLPQFQIQGYQLLLLPLFAQAANLHLSFIRDVILNADEWGISAATVRTYRDHLRNFTRDYSNYCINTYQTAFRGLNTRLHDMLEFRTYMFLNVFEYVSIWSLFKYQSLLVSSGANLYASGSGPTQSFTAQNWPFLYSLFQVNSNYVLNGLSGARTTITFPNIGGLPGSTTTQTLHFARINYRGGVSSSRIGQANLNQNFNISTLFNPLQTPFIRSWLDSGTDREGVATSTNWQSGAFETTLLRFSIFSARGNSNFFPDYFIRNISGVVGTISNADLARPLHFNEIRDIGTTAVASLVPVHNRKNNIYATHENGTMIHLAPNDYTGFTVSPIHATQVNNQIRTFISEKYGNQGDSLRFELSNTTARYTLRGNGNSYNLYLRVSSIGSSTIRVTINGRVYTANVNTTTNNDGVLDNGARFSDINIGNVVASANTNVPLDIQVTFNGNPQFELMNIMFVPTNLPPLY

SEQ ID NO: 284 - protein, 625 aa, Bacillus thuringiensis
MNTVLNNGRNTTCHAHNVVAHDPFSFEHKSLNTIEKEWKEWKRTDHSLYVAPIVGTVGSFLLKKVGSLVGKRILSELQNLIFPSGSIDLMQEILRATEQFINQRLNADTLGRVNAELAGLQANVAEFNRQVDNFLNPNQNPVPLAIIDSVNTLQQLFLSRLPQFQIQGYQLLLLPLFAQAANLHLSFIRDVILNADEWGISAATVRTYRDHLRNFTRDYSNYCINTYQTAFRGLNTRLHDMLEFRTYMFLNVFEYVSIWSLFKYQSLLVSSGANLYASGSGPTQSFTAQNWPFLYSLFQVNSNYVLNGLSGARTTITFPNIGGLPGSTTTQTLHFARINYRGGVSSSRIGQANLNQNFNISTLFNPLQTPFIRSWLDSGTDREGVATSTNWQSGAFETTLLRFSIFSARGNSNFFPDYFIRNISGVVGTISNADLARPLHFNEIRDIGTTAVASLVTVHNRKNNIYDTHENGTMIHLAPNDYTGFTVSPIHATQVNNQIRTFISEKYGNQGDSLRFELSNTTARYTLRGNGNSYNLYLRVSSIGSSTIRVTINGRVYTANVNTTTNNDGVLDNGARFSDINIGNVVASANTNVPLDIQVTFNDNPQFELMNIMLFQLIFHHFIKV

SEQ ID NO: 285 - protein, 623 aa, Bacillus thuringiensis WB9
MNSVLNSGRNTTCHAHNVVAHDPFSFEHKSLNTIEKEWKEWKRTDHSLYVAPIVGTVGSFLLKKVGSLVGKRILSELQNLIFPSGSIDLMQEILRATEQFINQRLNADTLGRVNAELAGLQANVAEFNRQVDNFLNPNQNPVPLAIIDSVNTLQQLFLSRLPQFQIQGYQLLLLPLFAQAANLHLSFIRDVILNADEWGISAATVRTYRDHLRNFTRNYSNYCINTYQTAFRGLNTRLHDMLEFRTYMFLNVFEYVSIWSLFKYQSLLVSSGANLYASGSGPTQSFTAQNWPFLYSLFQVNSNYVLNGLSGARTTITFPNIGGLPGSTTTQTLHFARINYRGGVSSSRIGQANLNQNFNISTLFNPLQTPFIRSWLDSGTDREGVATSTNWQSGAFETTLLRFSIFSARGNSNFFPDYFIRNISGVVGTISNADLARPLYFNEIRDIGTTAVASLVTVHNRKNNIYDTHENGTMIHLAPNDYTGFTVSPIHATQVNNQIRTFISEKYGNQGDSLRFELSNTTARYTLRGNGNSYNLYLRVSSIGSSTIRVTINGRVYTANVNTTTNNDGVLDNGARFSDINIGNVVASANTNVPLDIQVTFNGNPQFELMNIMFVPTNIPPLY

SEQ ID NO: 286 - protein, 623 aa, Bacillus thuringiensis
MNNVLNSGRNTTCHAHNVVAHDPFSFEHKSLNTIEKEWKEWRRTDHSLYVAPIVGTVGSFLLKKVGSLVGKRILSELQNLIFPSGSIDLMQEILRATEQFINQRLNADTLGRVNAELAGLQANVAEFNRQVDNFLNLNQNPVPLAIIDSVNTLQQLFLSRLPQFQIQGYQLLLLPLFAQAANLHLSFIRDVILNADEWGISAATVRTYRDHLRNFTRDYSNYCINTYQTAFRGLNTRLHDMLEFRTYMFLNVFEYVSIWSLFKYQSLLVSSGANLYASGSGPTQSFTAQNWPFLYSLFQVNSNYVLNGLSGARTTITFPNIGGLPGSTTTQTLHFARINYRGGVSSSRIGQANLNQNFNISTLFNPLQTPFIRSWLDSGTDREGVATSTNWQSGAFETTLLRFSIFSARGNSNFFPDYFIRNISGVVGTISNADLARPLHFNEIRDIGTTAVASLVTVHNRKNNIYDTHENGTMIHLAPNDYTGFTVSPIHATQVNNQIRTFISEKYGNQGDSLRFELSNTTARHTLRGNGNSYNLYLRVSSIGSSTIRVTINGRVYTANVNTTTNNDGVLDNGARFSDINIGNVVASANTNVPLDIQVTFNGNPQFELMNIMFVPTNIPPLY

SEQ ID NO: 287 - protein, 623 aa, Bacillus thuringiensis wuhanensis
MNTVLNNGRNTTCHAHNVVAHDPFSFEHKSLNTIEKEWKEWKRTDHSLYVAPIVGTVGSFLLKKVGSLVGKRILSELQNLIFPSGSIDLMQEILRATEQFINQRLNADTLGRVNAELAGLQANVAEFNRQVDNFLNPNQNPVPLAIIDSVNTLQQLFLSRLPQFQIQGYQLLLLPLFAQAANLHLSFIRDVILNADEWGISAATVRTYRDHLRNFTRDYSNYCINTYQTAFRGLNTRLHDMLEFRTYMFLNVFEYVSIWSLFKYQSLLVSSGANLYASGSGPTQSFTAQNWPFLYSLFQVNSNYVLNGLSGARTTITFPNIGGLPGSTTTQTLHFARINYRGGVSSSRIGQANLNQNFNISTLFNPLQTPFIRSWLDSGTDREGVATSTNWQSGAFETTLLRFSIFSARGNSNFFPDYFIRNISGVVGTISNADLARPLHFNEIRDIGTTAVASLVTVHNRKNNIYDTHENGTMIHLAPNDYTGFTVSPIHATQVNNQIRTFISEKYGNQGDSLRFELSNTTARYTLRGNGNSYNLYLRVSSIGSSTIRVTINGRVYTANVNTTTNNDGVLDNGARFSDINIGNVVASANTNVPLDIQVTFNGNPQFELMNIMFVPTNLPPLY

SEQ ID NO: 288 - protein, 623 aa, Bacillus thuringiensis SBSBT-1
MNTVLNNGRNTTCHAHNVVAHDPFSFEHKSLNTIEKEWKEWKRTDHSLYVAPIVGTVGSFLLKKVGSLVGKRILSELQNLIFPGGSIDLMQEILRATEQFINQRLNADTLGRVNAELAGLQANVAEFNRQVDNFLNPNQNPVPLAIIDSVNTLQQLFLSRLPQFQIQGYQLLLLPLFAQAANLHLSFIRDVILNADEWGISAATVRTYRDHLRNFTRDYSNYCINTYQTAFRGLNTRLHDMLEFRTYMFLNVFEYVSIWSLFKYQSLLVSSGANLYASGSGPTQSFTAQNWPFLYSLFQVNSNYVLNGLSGARTTITFPNIGGLPGSTTTQTLHFARINYRGGVSSSRIGQANLNQNFNISTLFNPLQTPFIRSWLDSGTDREGVATSTNWQSGAFETTLLRFSIFSARGNSNFFPDYFIRNISGVVGTISNADLARPLHFNEIRDIGTTAVASLVTVHNRKNNIYDTHENGTMIHLAPNDYTGFTVSPIHATQVNNQIRTFISEKYGNQGDSLRFELSNTTARYTLRGNGNSYNLYLRVSSIGSSTIRVTINGRVYTANVNTTTNNDGVLDNGARFSDINIGNVVASANTNVPLDIQVTFNGNPQFELMNIMFVPTNLPPLY

SEQ ID NO: 289 - protein, 623 aa, Bacillus thuringiensis CMBL-BT1
MNTVLNNGRNTTCHAHNVVAHDPFSFEHKSLNTIEKEWKEWKRTDHSLYVAPIVGTVGSFLLKKVGSLVGKRILSELQNLIFPSGSIDLMQEILRATEQFINQRLNADTLGRVNAELAGLQANVAEFNRQVDNFLNPNQNPVPLAIIDSVNTLQQLFLSRLPQFQIQGYQLLLLPLFAQAANLHLSFIRDVILNADEWGISAATVRTYRDHLRNFTRDYSNYCIDTYQTAFRGLNTRLHDMLEFRTYMFLNVFEYVSIWSLFKYQSLLVSSGANLYASGSGPTQSFTAQNWPFLYSLFQVNSNYVLNGLSGARTTITFPNIGGLPGSTTTQTLHFARINYRGGVSSSRIGQANLNQNFNISTLFNPLQTPFIRSWLDSGTDREGVATSTNWQSGAFETTLLRFSIFSARGNSNFFPDYFIRNISGVVGTISNADLARPLHFNEIRDIGTTAVASLVTVHNRKNNIYDTHENGTMIHLAPNDYTGFTVSPIHATQVNNQIRTFISEKYGNQGDSLRFELSNTTARYTLRGNGNSYNLYLRVSSIGSSTIRVTINGRVYTANVNTTTNNDGVLDNGARFSDINIGNVVASANTNVPLDIQVTFNGNPQFELMNIMFVPTNLPPLY

SEQ ID NO: 290 - protein, 623 aa, Bacillus thuringiensis CMBL-BT2
MNTVLNNGRNTTCHAHNVVAHDPFSFEHKSLNTIEKEWKEWKRTDHSLYVAPIVGTVGSFLLKKVGSLVGKRILSELQNLIFPSGSIDLMQEILRATEQFINQRLNADTLGRVNAELAGLQANVAEFNRQVDNFLNPNQNPVPLAIIDSVNTLQQLFLSRLPQFQIQGYQLLLLPLFAQAANLHLSFIRDVILNADEWGISAATVRTYRDHLRNFTRDYSNYCINTYQTAFRGLNTRLHDMLEFRTYMFLNVFEYVSIWSLFKYQSLLVSSGANLYASGSGPTQSFTAQNWPFLYSLFQVNSNYVLNGLSGARTTITFPNIGGLPGSTTTQTLHFARINYRGGVSSSRIGQANLNQNFNISTLFNPLQTPFIRSWLDSGTDREGVATSTNWQSGAFETTLLRFSIFSARGNSNFFPDYFIRNISGVVGTISNADLARPLHFNEIRDIGTTAVASLVTVHNRKNNIYDTHENGTMIHLAPNDYTGFTVSPIHATQVNNQIRTFISEKYGNQGDSLRFELSNTTARYTLRGNGNSYNLYLRVSSIGSSTIRVTINGRVYTANVNTTTNNDGVLDNGARFSDINIGNVVASANTNVPLDIQVTFNGNPQFEFMNIMFVPTNLPPLY

SEQ ID NO: 291 - protein, 633 aa, Bacillus thuringiensis BR30
MNSVLNSGRNTICDAYNVVVHDPFSFQHKSLDTIQKEWMEWKKDNHSLYVDPIVGTVASFLLKKLGSLIGKRILSELRNLIFPSGSTNLMEDILRETEKFLNQKLNTDTLSRVNAELTGLQANVEEFNRQVDNFLNPNRNAVPLSITSSVNTMQQLFLNRLSQFQMQGYQLLLLPLFAQAANLHLSFIRDVILNAEEWGISAATLRTYQNHLRNYTRDYSNYCIDTYQTAFRGLNTRLHDMLEFRTYMFLNVFEYVSIWSLFKYQSLLVSSGANLYASGSGPQQTQLFTSQDWPFLYSLFQVNSNYVLSGFSGASLFTTFPNIGGLPGSTTTQALLAARVNYSGGITSGSIGGSNFNQNFNCNTISPPLSTSFVRSWLDSGSDRQGVNTVTNWQTESFETTSGLRCGAFTPRGNSNYYPGYFIRNISGVSLVLRNEDLKRPLYYNEKRNIESPSGTPGGARAYMVSVHNKKNNIYAVHENGTMIHLAPEDNTGFTISPIHATQVNNQTRTFISEKFGNQGDSLRFEQSNTTARYTLRGNGNSYNLYLRVSSIGNSTIRVTINGRVYTASNVNTTTNNDGVNDNGARFSDINIGNVVASSNSDVPLDINVTLNSGTQFDLMNIMLVPTNISPLY

SEQ ID NO: 292 - protein, 633 aa, Bacillus thuringiensis WB10
MNSVLNSGRTTICDAYNVVVHDPFSFQHKSLDTIQKEWMEWKKDNHSLYVDPIVGTVASFLLKKLGSLIGKRILSELRNLIFPSGSTNLMEDILRETEKFLNQKLNTDTLSRVNAELTGLQANVEEFNRQVDNFLNPNRNAVPLSITSSVNTMQQLFLNRLSQFQMQGYQLLLLPLFAQAANLHLSFIRDVILNAEEWGISAATLRTYQNHLRNYTRDYSNYCIDTYQTAFRGLNTRLHDMLEFRTYMFLNVFEYVSIWSLFKYQSLLVSSGANLYASGSGPQQTQLFTSQDWPFLYSLFQVNSNYVLSGFSGASLFTTFPNIGGLPGSTTTQALLAARVNYSGGITSGSIGGPNFNQNFNCNTISPPLSTSFVRSWLDSGSDRQGVNTVTNWQTESFETTSGLRCGAFTPRGNSNYYPGYFIRNISGVSLVLRNEDLKRPLYYNEKRNIESPSGTPGGARAYMVSVHNKKNNIYAVHENGTMIHLAPEDNTGFTISPIHATQVNNQTRTFISEKFGNQGDSLRFEQSNTTARYTLRGNGNSYNLYLRVSSIGNSTIRVTINGRVYTASNVNTTTNNDGVNDNGARFSDINIGNVVASSNSDVPLDINVTLNSGTQFDLMNIMLVPTNLPPLY

SEQ ID NO: 293 - protein, 633 aa, Bacillus thuringiensis 5_2AcT(1)
MNTVLNNGRNTICDAYNVVVHDPFSFQHKSLDTIQKEWMEWKKDIHSLYVDPIVGTVASFLLKKLGSLIGKRILSELRNLIFPSGSTNLMEDILRETEKLLNQKLNTDTLSRVNAELTGLQANVEEFNRQVDNFLNPNRNAVPLSITSSVNTMQQLFLNRLSQFQMQGYQLLLLPLFAQAANLHLSFIRDVILNAEEWGISAATLRTYQNHLRNYTRDYSNYCIDTYQTAFRGLNTRLHDMLEFRTYMFLNVFEYVSIWSLFKYQSLLVSSGANLYASGSGPQQTQLFTSQDWPFLYSLFQVNSNYVLSGFSGASLFTTFPNIGGLPGSTTTQALLAARVNYSGGITSGSIGGSNFNQNFNCNTISPPLPTSFVRGWLDSGSDRQGVNTVTNWQTESFEATSGLRCGAFTPRGNSNYYPGYFIRNISGVSLVLRNEDLKRPLYYNEKRNIESPSGTPGGARAYMVSVHNKKNNIYAVHENGTMIHLAPEDNTGFTISPIHATQVNNQTRTFISEKFGNQGDSLRFEQSNTTARYTLRGNGNSYNLYLRVSSIGNSTIRVTINGRVYTASNVNTTTNNDGVNDNGARFSDINIGNVVASSNSDVPLDINVTLNSGTQFDLMNIMLVPTNLPPLY

SEQ ID NO: 294 - protein, 633 aa, Bacillus thuringiensis CMBL-BT2
MNTVLNNGRNTICDAYNVVVHDPFSFQHKSLDTIQKEWMEWKKDNHSLYVDPIVGTVASFLLKKLGSLIGKRILSELRNLIFPSGSTNLMEDILRETEKFLNQKLNTDTLSRVNAELTGLQANVEEFNRQVDNFLNPNRNAVPLSITSSVNTMQQLFLNRLSQFQMQGYQLLLLPLFAQAANLHLSFIRDVILNAEEWGISAATLRTYQNHLRNYTRDYSNYCIDTYQTAFRGLNTRLHDMLEFRTYMFLNVFEYVSIWSLFKYQSLLVSSGANLYASGSGPQQTQLFTSQDWPFLYSLFQVNSNYVLSGFSGASLFTTFPNIGGLPGSTTTQALLAARVNYSGGITSGSIGGSNFNQNFNCNTISPPLSTSFVRSWLDSGSDRQGVNTVTNWQTESFETTSGLRCGAFTPRGNSNYYPGYFIRNISGVSLVLRNEDLKRPLYYNEKRNIESPSGTPGGARAYMVSVHNKKNNIYAVHENGTMIHLAPEDNTGFTISPIHATQVNNQTRTFISEKFGNQGDSLRFEQSNTTARYTLRGNGNSYNLYLRVSSIGNSTIRVTINGRVYTASNVNTTTNNDGVNDNGARFSDINIGNVVASSNSDVPLDINVTLNSGTQFDLMNIMLVPTNLPPLY

SEQ ID NO: 295 - protein, 633 aa, Bacillus thuringiensis HD29
MNSVLNSGRTTICDAYNVAAHDPFSFQHKSLDTVQKEWTEWKKNNHSLYLDPIVGTVASFLLKKVGSLVGKRILSELRNLIFPSGSTNLMQDILRETEKFLNQRLNTDTVARVNAELTGLQANVEEFNRQVDNFLNPNRSAVPLSITSSVNTMQQLFLNRLPQFQMQGYQLLLLPLFAQAANLHLSFIRDVILNAEEWGISAATLRTYRDYLKNYTRDYSNYCIDTYQTAFRGLNTRLHDMLEFRTYMSLNVFEYVSIWSLFKYQSLLVSSGANLYASGSGPQQTQLFTSQDWPFLYSLFQVNSNYVLSGFSGASLFTTFPNIGGLPGSTTTQALLAARVNYSGGITSGSIGGSNFNQNFNCNTISPPLSTSFVRSWLDSGSDRQGVNTATNWQTESFETTSGLRCGAFTPRGNSNYYPGYFIRNISGVSLVLRNEDLKRPLYYNEKRNIESPSGTPGGARAYMVSVHNKKNNIYAVHENGTTIHLAPEDNTGFTISPIHATQVNNQTRTFISEKFGNQGDSLRFEQSNTTARYTLRGNGNSYNLYLRVSSIGNSTIRVTINGRVYTASNVNTTTNNDGVNDNGARFSDINIGNVVASSNSDVPLDINVTLNSGTQFDLMNIMLVPTNISPLY

SEQ ID NO: 296 - protein, 632 aa, Bacillus thuringiensis
MNNVLNNGRTTICDAYNVVAHDPFSFEHKSLDTIRKEWMEWKRTDHSLYVAPIVGTVSSFLLKKVGSLIGKRILSELWGLIFPSGSTNLMQDILRETEQFLNQRLNTDTLARVNAELEGLQANIREFNQQVDNFLNPTQNPVPLSITSSVNTMQQLFLNRLPQFRVQGYQLLLLPLFAQAANMHLSFIRDVVLNADEWGISAATLRTYQNYLKNYTTEYSNYCINTYQTAFRGLNTRLHDMLEFRTYMFLNVFEYVSIWSLFKYQSLLVSSGANLYASGSGPQQTQSFTSQDWPFLYSLFQVNSNYVLNGFSGARLTQTFPNIGGLPGTTTTHALLAARVNYSGGVSSGDIGAVFNQNFSCSTFLPPLLTPFVRSWLDSGSDRGGVNTVTNWQTESFESTLGLRCGAFTARGNSNYFPDYFIRNISGVPLVVRNEDLRRPLHYNEIRNIESPSGTPGGLRAYMVSVHNRKNNIYAVHENGTMIHLAPEDYTGFTISPIHATQVNNQTRTFISEKFGNQGDSLRFEQSNTTARYTLRGNGNSYNLYLRVSSLGNSTIRVTINGRVYTASNVNTTTNNDGVNDNGARFLDINMGNVVASDNTNVPLDINVTFNSGTQFELMNIMFVPTNLPPIY

SEQ ID NO: 297 - protein, 626 aa, Bacillus thuringiensis C81
MNSVLNSGRTTICDAYNVVAHDPFSFQHKSLDTIQKEWTEWKKNNHSLYVDPIVGTVGSFLLKKVGSLIGKRILSELLNLIFPSGNTNLMQDILRETEKLLNQRLNADTLNRVNAELRGLEANVNEFNRQVDNFLNPNRNAVPLSITSSVNTMQQLFLSRLPQFQIQGYQLLLLPLFAQAANLHLSFIRDVILNADEWGISAATLRTYRDHLRNYTRDYSNYCINTYQTAFRGLNTRLHDMLEFRTYMFLNVLDYVSIWSLFKYQSLLVSSGANLYACGNSPNTQSFTAQDWPFLYSLFQVNSNYILSGLSGSRSTITLPVIGPFPGTTTTQTLHNARINYRGGISSGLIGSSNLNQNFNITPIFNPLLTPFIRSWLDSGIDREGLATTTNWMTGSFETTIGLRFSIFTARGNSNYFPDYFIRNISGVVRDLRNEDLRKPLHFNEIRNIGTTPVSSLVSVHNRKNNIYAVHENGSMIHLMPKDYTGFTISPIHATHVNNQNRTFISEKFGNQGDSLRFEQSNTTARYTFRGNGNSYNLYLRVSSLGNSTIRVTINGRVYTATNVNTTTNNDGVNDNGAHFSDINIGNVVASSNTDVPLDINVTFNSGAQFDLMNIMLVPTNISPLY

SEQ ID NO: 298 - protein, 626 aa, Bacillus thuringiensis SK-758
MNSVLNSGRTTICDAYNVVAHDPFSFQHKSLDTIQKEWTEWKKNNHSLYVDPIVGTVGSFLLKKVGSLIGKRILSELLNLIFPSGDTNLMQDILRETEKLLNQRLNADTLNRVNAELRGLEANVNEFNRQVDNFLNPNRDAVPLSITSSVNTMQQLFLSRLPQFQIQGYQLLLLPLFAQAANLHLSFIRDVILNADEWGISAATLRTYRDHLRNYTRDYSNYCINTYQTAFRGLNTRLHDMLEFRTYMFLNVLDYVSIWSLFKYQSLLVSSGANLYACGNSPNTQSFTAQDWPFLYSLFQVNSNYILSGLSGSRSTITLPVIGPFPGTTTTQTLHNARINYRGGISSGLIGSSNLNQNFNITPIFNPLLTPFIRSWLDSGIDREGLATTTNWMTGSFETTIGLRFSIFTARGNSNYFPDYFIRNISGVVRDLRNEDLRKPLHFNEIRNIGTTPVSSLVSVHNRKNNIYAVHENGSMIHLMPKDYTGFTISPIHATHVNNQNRTFISEKFGNQGDSLRFEQSNTTARYTFRGNGNSYNLYLRVSSLGNSTIRVTINGRVYTATNVNTTTNNDGVNDNGAHFSDINIGNVVASSNTDVPLDINVTFNSGAQFDLMNIMLVPTNISPLY

SEQ ID NO: 299 - protein, 634 aa, Bacillus thuringiensis JF19-2
MNSVLNTGRTTICDAYNVAAHDPFSFQHKSLDTVQKEWTEWKKNNHSLYLDPIVGTVASFLLKKVGSLVGKRILSELRNLIFPSGSTNLMQDILRRDTKNSCIKDLIQTLLPVYMRNWHGLQADVEEFNRQVDNSLNPNRNAVPLSITSSVNTLQHLFLNRLPQFQLQGYQLLLLPLFAQAANLHLSFIRDVILNADEWGISAATLRTYRDYLKNYTRDYSNYCINTYQSAFKGLNTRLHDLLEFRTYLFLNVFEYVSIWSLFKYQSLLVSSGANLSASGSGPQQTQSFTSQDWPFLYSLFQVNSNYVLNGFSGARLSNTFPNIVGLPGSTTTHALLAARVNYSGGISSGDIGASPFNQNFNCSTFLPPLLTPFVRSWLDSGSDRERVATVTNWRTESFETTLGLRSGAFTARGNSNYYSDYFIRNISGVPLVVRNEDLRRPLHYNEIRNIASPSGTPGGARAYLVSVHNRKNNIHAVHENGSLIHLAPTDYTGFTISPIHATQANNQTRTFISEKFGNQGDSLRFEQNNTTARYTLRGNGNSYNLYLRVSSIGNSTIRVTINGRVYTATTVNTTTNNDGVNDNGARSSNINIGNVVASSNPDVPLDINVTLNSGTQFDLMNTMLVPTNISPLY

SEQ ID NO: 300 - protein, 632 aa, Bacillus thuringiensis SC6H8
MNNVLNSGRATNGDAYNVVAHDPFSFQHKSLDTIQEEWMEWKKDNHILYVDPIVGTVASFLLKKVGSLVEKRILSELRNLIFPSGSTNLMQDILRETEKFLNQRLNTDTLARVNAELTGLQANVEEFNRQVDNFLNPNRNAVPLSITSSVNTMQQLFLNRLPQFQMQGYQLLLLPLFAQAANLHLSFIRDVILNADEWGISAATLRTYQNHLRNYTREYSNYCITTYQTAFRGLNTRLHDMLEFRTYMFLNVFEYVSIWSLFKYQSLLVSSGANLYASGSGPQQTQSFTSQDWPFLYSLFQVNSNYVLNGFSGARLTQTFPNIVGLPGTTTTHALLAARVNYSGGVSSGDIGAVFNQNFSCSTFLPPLLTPFVRSWLDSGSDRGGINTVTNWQTESFETTLGLRSGAFTARGNSNYFPDYFIRNISGVPLVVRNEDLRRPLHYNQIRNIESPSGTPGGLRAYMVSVHNRKNNIYAVHENGTMIHLAPEDYTGFTISPIHATQVNNQTRTFISEKFGNQGDSLRFEQSNTTARYTLRGNGNSYNLYLRVSSIGNSTIRVTINGRVYTASNVNTTTNNDGVNDNGARFSDINIGNVVASDNTNVPLDINVTLNSGTQFELMNIMFVPTNLPPLY

SEQ ID NO: 301 - protein, 632 aa, Bacillus thuringiensis BRC-ZQL3
MNSVLNSGRTTICDAYNVAAHDPFSFQHKSLDTVQKEWTEWKKNNHSLYLDPIVGTVASFLLKKVGSLVGKRILSELRNLIFPSGSTNLMQDILRETEKFLNQRLNTDTLARVNAELTGLQANVEEFNRQVDNFLNPNRNAVPLSITSSVNTMQQLFLNRLPQFQMQGYQLLLLPLFAQAANLHLSFIRDVILNADEWGISAATLRTYRDYLKNYTRDYSNYCINTYQSAFKGLNTRLHDMLEFRTYMFLNVFEYVSIWSLFKYQSLLVSSGANLYASGSGPQQTQSFTSQDWPFLYSLFQVNSNYVLNGFSGARLTQTFPNIVGLPGTTTTHALLAARVNYSGGVSSGDIGAVFNQNFSCSTFLPPLLTPFVRSWLDSGSDRGGINTVTNWQTESFETTLGLRSGAFTARGNSNYFPDYFIRNISGVPLVVRNEDLRRPLHYNQIRNIESPSGTPGGLRAYMVSVHNRKNNIYAVHENGTMIHLAPEDYTGFTISPIHATQVNNQTRTFISEKFGNQGDSLRFEQSNTTARYTLRGNGNSYNLYLRVSSIGNSTIRVTINGRVYTASNVNTTTNNDGVNDNGARFSDINIGNVVASDNTNVPLDINVTLNSGTQFELMNIMFVPTNISPLY

SEQ ID NO: 302 - protein, 688 aa, Bacillus thuringiensis medellin
MNSYENKNEYEILDTSQKNSNMSNRYSKYPLTNNPKVPLQNTNYKDWLNMCQTITPLCTPIDTDSKLVATAIKVIGAIFKSMPGPGAAVGLVLKSFSTIIPILWPNDKTPIWKEFTKQGLQLFRPELGRDAIEIIGNDVQAEYNSLEIMMRDFENKFANWESNRTRANAIAVTTAFSTVNTQIIRLKERFLIAPENRPAFLNLYAQTANIDLILYQRGSVYGDKWVADINNRSTSPFSSKDYYQSLKGKIKDYTNYCAETYRNSLTILKNKPHIQWDIYNRYRREAILGALDLVALFPNYDICIYPTQTRTELTRKVYMPSFYLQALQQRDIETVENQLTHPPSLFTWLNELNLYTIRERFNPVLQVASLSGLQATSRYTQNTTTISNPVQGPVREGTPTKISLANYYIYKLFMSQYRHPNDCLPISGINEMSFYRSDYYGAGGPAPVHYSAGESPTNVIKTYMNGPQNALISNDISINETSHILSDIKMNYSRTGGVYPLYDFGYSFAWTHTSVDPDNLIVPNRITQIPAVKAYSLTSPARVIVGPGHTGGDLVALLNSGTQSGTMQIQCKTGSFTGPSRQYGLRMRYAANSAFTVSLSYTLLGQTRGTSFVTENTFSRSNNIIPTDLKYEEFKYKDYLQIITMTLPANTIITISMQQATGLLNNQLIIDRIEFYPMDQGVVACTVN

SEQ ID NO: 303 - protein, 683 aa, Bacillus thuringiensis entomocidus
MNPYQKKTEYEILDALPNYSNMVNAYSRYPLANNPQVPLQNTSYKDWLNMCQTINPLCTPINIDIDSLAASIAVVGSILALIPGPGEAIGFVLGTFSTILPILWPNGETKIWTDFAERGLQLFRPELGQDAIEILVTGVKSGYNALKNRMENFEQAFTKWKGNRTRSNAEQVIRDFDSVRDKVIDLKNDYMINPENKPAFINLYAQTANIDLILYQRGAVYGDDWEKDINGSISPFWGSKDYYESLKTKIEEYTNYCAETYRNSLNILKNKPNISWDTYNKYRREATLGALDLVALFPNYDMHLYPAATKTELTRKIYMPSFGLQQSNYFQSLEGLENALTHPPSLFTWLNELNLYTVRENFNPALQVSSLSGLQARSRYTQNPTILDNPAQGVRNGTSTQIGLNNLFVYKLSMSQYHHPNDCSSIAGISDMTFYKSDYNGNASATQTYQAGRNTNNVINTFMNGPQKASSSNNISIKQTKHILSDIKMIYFRTGGMYQVYDFGYSFAWTHTSVDPDNLIVPNRITQIPAVKALGISTDSKVVKGPVFIGGDLLLLKLQATIRIKTDHANTRYKIRVRYASNANTPIVLSSLQNTLTVTFPQTITHSTISELQYKDFQYVTFPGEFIMDKPSIDVAIRGVQNDRNDIWIDRIEFLPITQSVLDYTEEQNIEKSQKAVNDLFIN

SEQ ID NO: 304 - protein, 688 aa, Bacillus thuringiensis sotto
MNLYGNKNDSEILNASSNNSNMSTTYPKYPLAHSRQDSMENMNYKEWINQCETINTFCTPIDTDINSVAATIGAVGAILALIPGPGEAIGFVLSTFTSLIPYLWPSDTKKIWGDFTKQGLQLFRPELGNDAIEIIGNDVQSEYNSLKTFMQNFEDSFTDWKKYRNRATAVAVTNDFSSVRDQIIRLKDRFLINPENKPAFLILYAQTANFDLILYQRGALYADEWENDINRSISPLLGSKDYYISLAAKIKEYTNYCAETYRNSLNILKNKTNISWGTYNKYRREVTLGALDLAALFPNYDICIYPIQTKTELTRKVYMPSFGLQQSNYFQSLEGLENALTHPPSLFTWLNELNLYTIRENFNPALLVSSLSGLQAISRYTQNPNRISNPAQGVRNGTPTQIGLNNLFVYKLSLSQYHHPNECYSIAGISDMTFYKSDYNGNAPTTQTYQAGRNSNNFINTFMNGPQEASSSNNISIKQTNHILSDIKMIYSRTGGTYPSYDFGYSFAWTHTSVNPDNLIVPNRITQIPAVKADYLTSPAKVIAGPGHTGGDLVALLNAATQAGRMQIQCKTGSFTGASRRYGIRIRYAANNALTVSLSYTVQGGNTMSTTFITERTFLRPNNTIPTDLKYEEFKYKEYNQIITMTAPQNTIVTIAIQQLNAFPNDQLIIDRIEFYPMDQGVVPCTVN

SEQ ID NO: 305 - protein, 688 aa, Bacillus thuringiensis jegathesan 367
MNLYGNKNDSEILNASSNNSNMSTTYPKYPLAHSRQDSMQNMNYKEWINQCETINTFCTPINIDINSVAATIGAVGAILALIPGPGEAIGFVLSTFTSLIPYLWPSDTKKIWGDFTKQGLQLFRPELGNDAIEILGNDVQSEYNSLKTFMQNFEKSFAAWKIKRDRATAVAVTNDFSSVRDQIIRLKDRFLINPENKPAFLILYAQTANFDLILYQRGALYADEWENDINRSISPLLGSKDYYISLAAKIKEYTNYCAETYRNSLDILKNKPNISWDTYNKYRREVTLGALDLAALFPNYDICIYPIQTKTELTRRVYMPSFGLQQSNYFQSLEGLENALTHPPSLFTWLNELNLYTIRENFNPALLVSSLSGLQAISRYTQNPNRISNPDQGVRTGTPTQIGLNNLFVYKLSLSQYHHPNECYSIAGISDMTFYKSDYNGNAPTTQTYQAGRNSNNFINTFMNGPQEASSSNNISIKQTNHILSDIKMIYSRTGGTYPSSDFGYSFAWTHTSVNPDNLIVPNRITQIPAVKADYLTSPAKVIAGPGHTGGDLVALLNAATQAGRMQIQCKTGSFTGASRRYGIRIRYAANNALTVSLSYTVQGGNTMGTTFITERTFLRPNNTIPTDLKYEEFKYKEYNQIITMTAPQNTIVTIAIQQLNAFPNDQLIIDRIEFYPMDQGVVPCTVN

SEQ ID NO: 306 - protein, 684 aa, Bacillus thuringiensis Y41
MNPYQNTNECEILDDLPNYSKMVNAYSRYPLANNPEVPLQNTSYKDWLNMCQTITPLCTPIDSDINSIAAAIGVIGSILGLIPGPGEAIGLILGTFSSIIPFLWPENKSIIWEEFTHRGLHLIRPELTPTEIEIIVTPLKGYYNALREQLENFESEFAKWALEKSPANTRDVVLRFSAIDAAIINLKNQLIVDVRNKPAFLSLYAQTANIDLILFQRGDKYGDEWVKYARNQPIPFKTSQEYYNSLKDKIENYTNDIAETYRNGLNIIKNIPKISWDVFNLYRREMTLSALDLVALFLNYDIYRYPISTKTELTRKVYMSSFYLQALEQNESLESLENKPLPHSPSLFTWLKRLNLYTISEDYSIPLRVSSLSGLSAVYSHTHQQQALYTRPYQGVLVGQPQEIRFDGFVYKLFMSQNISPNSCYLIGGIPQMSFYISDYSGGLRPNKDYYSASASIYFINSYMNGPQNATKSNNISIRETKHILSDIKMNYSKTGGFYPFHTFGYSFAWTHTSVDPDNLIVPNRITQIPAVKAHYLSATAKVIAGPGHTGGDLVALINDGSRTGSMNIECKTGSFTQPSRRFGLRMRYAENNQFSVSILRDNQGVGTFNIERTFSRTNNIIPTDLKYNEFKYNNYDEITMDLPPNKIIDIRIQQTNSLSINQFIIDRIEFYPIDQGVEACKMQ

SEQ ID NO: 307 - protein, 684 aa, Bacillus thuringiensis aizawai BUN1-14
MNPYQNTNECEILDASPNYSKMGNAYSRYPLANNPQVPLQNTSYKDWLNMCQTITPLCTPIDPDINSVAAAIGVIGSIIGLIPGPGEAIGLILGTFSSIIPFLWPENKTIIWEEFTHRGLHLIRPELTPTEIEIIVNPLKGYYNALREQLENFESEFAIWARNKNAATTGDVLRRFSNIDADIIRLKHQLTVDVRNKPALLSLYAQTANIDLILFQRGAKYGDEWARYARNQPIPFKTSQEYYDSLKEKIENYTNDIAATYRNGLNIIKNIPKISWDVFNLYRREMTLSALDLVALFPNYDICRYPISTKTELTRKVYMSSFYLQALELNESLESLENKLTHPPSLFTWLKRLNLYTISENYSSPLRVSSLSGLSAVYSHTHQQQALYVGPPQGITGGSPQEIRFDGFVYKLFMSQNISPNGCYPIGGIPQMSFYISDYSGSPRPNKDYYSASAIQYISINSYMNGPQNATKSNNISIRETKHILSDIKMNYSQTGGFYPFHSFGYSFAWTHTSVDPDNLIVPNRITQIPAVKAHILSTTAKVIAGPGHTGGDLVALLNDDPRIGTMSIECKTGSFTQPSRRYGLRMRYAANNQFSVSISRNDQGVASFVTERTFSRTNNIIPTDLKYNEFKYNNYDQIIMDLPPNTIINIGIRQTNALSINQFIIDRIEFYPMDQGVEACKMQ

SEQ ID NO: 308 - protein, 688 aa, Bacillus thuringiensis S2160-1
MNSYQNTNEYEILDASQKNSTMSNRYPRCPLANNPQVPLQNTSYKDWLNMCQTITPLCTPVETVSDYVAAFIGVPGSIFGAMPGPGAAVGLFLSSFSTIIPILWPNDTTPIWKEFTKQGLQLFRPELGRDAIEIIGNDVQAEYNALKTMMQDFETKFATWDLNRTRANAIAATTEFNSVKNQIIRLQERFLIAAENRPAFLNLYAQTANIDLILYQRGAANGDKWLEDINNRSISPFSSKDYYQDLKLKIKNYTNYCAETYRNSLNILKNKSDIQWSIYNGYRRVATLGALDLVALFPNYDICIYPIQTQTELTRKVYMPSFYSERLPKGNIETWENSLTHPPSLFTWLKKLDPYTKSERFNPALEVASLCGLHAALSYTPQNGPEFAGPFQGILGTKTTPLISFDNQFVYELFLTQYRHPNDCYSISGKPKITFYISDYYGNSRPNKEYSSNIQLSSVITSYMNGPQNASTSNNISIKQTKHILSDIKMIYTQIGGIYPSHDFGYSFAWTHTSVDPDNLIVPNRITQIPAVKAYSLTSPARVIAGPGHTGGDLVALLNNNLEAGRMQIQCKTGSFTGASRRYGLRMRYAANSQFTVNLSYVLSGTTYGTSFITESTFSRLNNIIPTDLKYEEFKYKEYSQIITMTLPANTIITISIQQAVASSNYQLIIDRIELYPMDQDVVACTVN

SEQ ID NO: 309 - protein, 688 aa, Bacillus thuringiensis Ywc2-8
MNSYQNTNEYEILDASQKNSTMSNRYPRCPLANNPQVPLQNTSYKDWLNMCQTITPLCTPVETDSDYVAAFIGVLGSIFGAMPGPGAAVGLFLSSFSTIIPILWPNDTTPIWKEFTKQGLQLFRPELGRDAIEIIGNDVQAEYNALKTMMQDFETKFATWDLNRTRANAIAVTTEFNSVKNQIIRLQERFLIAAENRPAFLNLYAQTANIDLILYQRGAANGDKWLEDINNRSISPFSSKDYYQDLKLKIKNYTNYCAETYRNSLNILKNKSDIQWSIYNGYRRVATLGALDLVALFPNYDICIYPIQTQTELTRKVYMPSFYSERLPKGNIETWENSLTHPPSLFTWLKKLDPYTKSERFNPALEVASLCGLHAALSYTPQNGPEFAGPFQGILGTKTTPLISFDNQFVYKLFLTQYRHPNDCYSISGIPKITFYISDYYGNSRPNKEYSSNIQLSSVITSYMNGPQNASTSNNISIKQTKHILSDIKIIYTQIGGIYPSHDFGYSFAWTHTSVDPDNLIVPNRITQIPAVKAYSLTSPARVIAGPGHTGGDLVALLNNNLEAGRMQIQCKTGSLTGASRRYGLRMRYAANSQFTVNLSYVLSGTTYGTSFITESTFSRLNNIIPTDLKYEEFKYKEYSQIITMTLPANTIITISIQQAVASSNYQLIIDRIEFYPMDQGVVACTVN

SEQ ID NO: 310 - protein, 687 aa, Bacillus thuringiensis MC28
MKPYQSENEYEILDTLPKYSNIVNVYSRYPLANNPQVPLQNTSYKDWLNMCQTITPLCTPIDIDSKLVATAIGILGAIFKAMPGPGSAVGLFLKTFSTIIPILWPNDNTPIWKEFTKQGLQLFRPELGRDAIEIIGNDVQSGFNALKDHMNDFETKFEIWDKDRTQTNATYLITAFGVVNGKIIDLKNQFLINPANQPAFLNLYAQTANIDLILYQRGAVYGDDWAKAINDSSISPFNSSQIFYDSLKAKIKEYTNYCAETYRNSLTILKNQPNIQWDIYNRYRREATLGALDLVALFPNYDICKYPISTKTELTRKVYMPSFYLQALQHSNIETLENQLTHPPSLFTWLNELNLYTIRENFNPALQVSSLSGLQAKYRYTQNSTILPNPPAQGITNGTPIPIIGLNNLFIYKLSMSQYRHPNDCVPIAGISDMTFYKSDYNGNASATQTYQAGRNSNNVIDTFMNGPQNASSSNNISINQTNHILSDIKMNYARSGGVYDFGYSFAWTHTSVDLDNLIVPNRITQIPAVKANFLSSPARVIAGPGHTGGDLVALLNGGTQAGKMQIQCKTGSSTGASRRYGIRMRYAANNAFTVSLSYTLQGGNTIGTTFITERTFSRPNNIIPTDLKYEEFKYKEYNQIITVTSPQNTIVTIAIRQLNPIPNDQLIIDRIEFYPVDQDAFACPVN

SEQ ID NO: 311 - protein, 664 aa, Bacillus thuringiensis HS18-1
MNLYQNENEYKILDVLPNYSNMVNAYSSYPLANNPQVPLQNTSYKDWLNMCQTITPLCTTIDSDINSVAAAIGVIASIIGLIRGPGEAIGLILGTFSSIIPFLWPENKTIIWEEFTHRGLNLIRPELTPAEIEIILNPLKGSYNALREQLVNFEREFAIWAGAKNQATTGDLLRRISAIEGAIIQLKNQLTVSEANKPALLSLYAQTANIDLILFQRGAKYGDEWAKYARNQPIPFKTSREYYASLIEKIKTYTNDIAGTYRNGLNKIKNIQNISWDTFNEYRRGMTLSALDLVALFPNYDICIYPIQTKTELTRKIYMPSFYLQALQQSGNLESLENQLTHPPSLFTWLNELNLYTISENFNPAILPNPAQGITGGTPIPIGLNNLFIYKLSMSQYHDPNGCYPIAGISDMTFYKSDYNGNASTTQPYHAGRNSNNVIDTFMNGPQNASSSNNISIKETKHILSDIKMVYSRSGVYSLGYSFAWTCTSVNPDNLIVPNRITQIPAVKANLLNSPARVIAGPGHTGGDLVALLNSGTQSGRMEIKCKTGSFTETSRRYGIRMRYAANNAFTVSLSYTLQGGNPIGITFGTERTFLRTNNIIPTDLKYEEFKYKEYNQIITMTAPQNTIVTIAVYQSTPSLNNQLIIDRIEFYPMDQGVEACKMN

SEQ ID NO: 312 - protein, 664 aa, Bacillus thuringiensis S2160-1
MNLYQNENEYKILDVLPNYSNMVNAYSRYPLANNPQVPLQNTSYKDWLNMCQTITPLCTTIDSDINSVAAAIGVIASIIGLIRGPGEAIGLILGTFSSIIPFLWPENKTIIWEEFTHRGLNLIRPELTPAEIEIILNPLKGSYNALREQLVNFEREFAIWAGAKNQATTGDLLRRISAIEGAIIQLKNQLTVSEANKPALLSLYAQTANIDLILFQRGAKYGDEWAKYARNQPIPFKTSREYYASLTEKIKTYTNDIAGTYRNGLNKIKNIQNISWDTFNEYRREMTLSALDLVALFPNYDICIYPIQTKTELTRKIYMPSFYLQALQQSGNLESLENQLTHPPSLFTWLNELNLYTISENFNPAILPNPAQGITGGTPIPIGLNNLFIYKLSMSQYHDPNGCYPIAGISDMTFYKSDYNGNASTTQPYHAGRNSNNVIDTFMNGPQNASSSNNISIKETKHILSDIKMVYSRSGVYSFGYSFAWTYTSVDPDNLIVPNRITQIPAVKANLLNSPARVIAGPGHTGGDLVALLNSGTQSGRMEIKCKTGSFTGASRRYGIRMRYAANNAFTVSLSYTLQGGNPIGITFGTERTFLRTNNIIPTDLKYEEFKYKEYNQIITMTAPQNTIVTIAVYQSTPSLNNQLIIDRIEFYPMDQGVEACKMN

SEQ ID NO: 313 - protein, 723 aa, Bacillus thuringiensis 84-HS-1-11
MDPFSNYSEQKYPDSNNNQELITKSSSFYSDTTNENAKNYHPIEQDILKFTNQEFSDNHYQHSDVSNDINSMRNTLCKDLPPETNMSIYDNLRSTVTVPSFSNQFDPIKFLHDIEIAIQTGSFSALTQSNMNQGGTDINPMLISTFFKVASSLLPFPLSSLGALASFYVTDSQTGAMANLWRQMVDYVEKRIDSKILDYHNFIMGAELAALNASLKEYARVVKIFENDMNRMAEPPSTGVITQFRILNDNFIKYIAKLQFSTNQSDLQYPVLTLPLRAQACVMHLMLLKDATTSVWGQQIDSQQLNGYKAELIRLIKVYTNDVNTTYNQGLELEKAKPLNYSDPEEYLQAGRPDISVLRSNFKEVMKWNRVAKYKRGMAMSALSLAALFPTFGPNYPKQALKVVQSRQIFAPVIGIPGGITSQDHSGTFGSMRFDVKTYDQIDALRRLMELYIQPLKSAYFYIYESDWKVRATYVNDYIGKRGSNTGLAWGMWSSDPSVIYTSALGAAGYAPNVVGVRYSHGGSYTKGMAPPNTNAYAPFEFKYPGYKLHSVSAYGLSKAPDTADSVMFGFRPVLLENEANQLLTDTALQIPAEIGITDVVPAFGRTEEPINGQDAIIIWESFTSGFGFTYTVDSPQKQKYKIIYRIANNLSASTVSLTYNNQTFFTDILNTSLDPNGVRGNYGSYTLVEGPIIEFSQGTNIFKLRSQKGEFAIDSIIFSPVS

SEQ ID NO: 314 - protein, 742 aa, Bacillus thuringiensis M15
MDPFSNYSEQKYPDSNNNQELITESSSFYSDTTNENMKTYHPIEQDILKFANQEFPDNYYQHSDVSNSYQNMKTEIVNTDLPYNTNNINSMRNTLCRDLPPETNMSIYDNLRSTVTVPSFSNQFDPIKFLHDIEIAIETGSFSALTQSNMNQGGTDIAPMLISTFFKVAGSLLPFPLSSLGALASFYVTDSQTGAMANLWRQMVDYVEKRIDSKILDYHNFIMGAELAALNASLKEYARVVKIFENDMNRIAEPPSTGVITQFRILNDNFIKYIAKLQFSTNQSDLQYPVLTLPLRAQACVMHLMLLKDATTSVWGQQIDSQQLNGYKAELIRLIKVYTNDVNTTYNQGLELEKAKPLNYSDPEEYLQAGRPDISVLRSNFKEVMKWNKVAKYKRGMAMSALSLAALFPTFGPNYPKQALKVVQSRQIFAPVIGIPGGITSQDSGPTFGSMRFDVKTYDQIDALRQLMELYIQPLKSAYFWIYESDWKVRATYVNDYIGKRGSNTGAAWHMWSSDPSAIYTSALGAAGYAPNVVGVRYSHGGSYTKGMAPANTNAYAPFEFKYPGYKLHSVSAYGLSKAPDAADSVMFGFRPVLLENEANQLLTDTALQIPAEIGITDVVPAFGRTEEPINGQDAIRIWESFTSGFGFTYTVDSPQKQKYKIIYRIANNLSASTVSLTYNNQTFFTDILNTSLDPNGVRGNYGSYTLVEGPIIEFSQGTNIFKLGSQKGEFAIDSIIFSPVV

SEQ ID NO: 315 - protein, 723 aa, Bacillus thuringiensis B0195; identical to SEQ ID NO: 313

SEQ ID NO: 316 - protein, 723 aa, Bacillus thuringiensis 79-25
MDPFSNYSEQKYPDSNNNQELITKSSSFYSDTTNENAKNYHPIEQDILKFTNQEFSDNHYQHSDVSNDINSMRNTLCKDLPPETNMSIYDNLRSTVTVPSFSNQFDPIKFLHDIEIAIQTGSFSALTQSNMNQGGTDINPMLISTFFKVASSLLPFPLSSLGALASFYVTDSQTGAMANLWRQMVDYVEKRIDSKILDYHNFIMGAELAALNASLKEYARVVKIFENDMNRMAEPPSTGVITQFRILNDNFIKYIAKLQFSTNQSDLQYPVLTLPLRAQACVMHLMLLKDATTSVWGQQIDSQQLNGYKAELIRLIKVYTNDVNTTYNQGLELEKAKPLNYSDPEEYLQAGRPDISVLRSNFKEVMKWNRVAKYKRGMAMSALSLAALFPTFGPNYPKQALKVVQSRQIFAPVIGIPGGITSQDHSGTFGSMRFDVKTYDQIDALRRLMELYIQPLKSAYFYIYESDWKVRATYVNDYIGKRGSNTGLAWGMWSSDPSVIYTSALGAAGYAPNVVGVRYSHGGSYTKGMAPPNTNAYAPFEFKYPGYKLHSVSAYGLSKAPDTADSVMFGFRPVLLENEANQLLTDTALQIPAEIGITDVVPAFGRTEEPINGQDAIIIWESFTSGFGFTYTVDSPQKQKYKIIYRIANNLSASTVSLTYNNQTFFTDILNTSLDPNGVRGNYGSYTLVEGPIMEFSQGTNIFRLRSQKGEFAIDSIIFSPVS

SEQ ID NO: 317 - protein, 723 aa, Bacillus thuringiensis 92-10
MDPFSNYSEQKYPDSNNNQELITKSSSFYSDTTNENAKNYHPIEQDILKFTNQEFSDNHYQHSDVSNDINSMRNTLCKDLPPETNMSIYDNLRSTVTVPSFSNQFDPIKFLHDIEIAIQTGSFSALTQSNMNQGGTDINPMLISTFFKVASSLLPFPLSSLGALASFYVTDSQTGAMANLWRQMVDYVEKRIDSKILDYHNFIMGAELAALNASLKEYARVVKIFENDMNRMAEPPSTGVITQFRILNDNFIKYIAKLQFSTNQSDLQYPVLTLPLRAQACVMHLMLLKDATTSVWGQQIDSQQLNGYKAELIRLIKVYTNDVNTTYNQGLELEKAKPLNYSDPEEYLQAGRPDISILRSNFKEVMKWNRVAKYKRGMAMSALSLAALFPTFGPNYPKQALKVVQSRQIFAPVIGIPGGITSQDHSGTFGSMRFDVKTYDQIDALRRLMELYIQPLKSAYFWIYESDWKVRATYVNDYIGKRGSNTGAAWHMWSSDPSVIYTSALGAAGYAPNVVGVRYSHGGSYTKGMAPPNTNAYAPFEFKYPGYKLHSVSAYGLSKAPDAADSVMFGFRPVLLENEANQLLTDTALQIPAEIGITDVVPAFGRTEEPINGQDAIIIWESFTSGFGFTYTVDSPQKQKYKIIYRIANNLSASTVSLTYNNQTFFTDILNTSLDPNGVRGNYGSYTLVEGPIIEFSQGTNIFKLRSQKGEFAIDSIIFSPVS

SEQ ID NO: 318 - protein, 754 aa, Bacillus thuringiensis M019
MSVVYHVKGGDIVDPFSNYSAQKYPDSNNNQELTTKSSLFYSDTTNGNVKNYHPIEQDILKFTNQEFSDNSYRHSDVSNSYENKKKEIINIDLPYNTNDINSMRNTLCRDLPPETNMSIYDNLRSAVTVPSFSNQFDPIKFLHDIEIAIQTGSFSALTQSNMNQGGTDINPMLISTFFKVASSLLPFPLSSLGALASFYITDSQTGAMANLWRQMVDYVEKRIDSKILDYHNFIMGAELAALNASLKEYARVVKIFENDMNRMAEPPSTGVITQFRILNDNFIKYIAKLQFSTNQSDLQYPVLTLPVRAQACVMHLMLLKDATTSVWGQQIDSQQLNGYKAELIRLIKVYTNDVNTTYNQGLELEKAKPLNYSDPEEYLQAGRPDISVLRSNFREVMKWNRVAKYKRGMAMSALSLAALFPTFGPNYPKQALKVVQSRQIFAPVIGIPGGITSQDSGPTFGSMRFDVKTYDQIDALRQLMELYIQPLKSAYFWIYESDWKVRATYVNDYIGKRGSNTGAAWHMWSSDPSAIYTSALGAAGYAPNVVGVRYSNGGSYTKGMAPANTNAYAPFEFKYPGYKLHSVSAYGLSKAPDAADSVMFGFRPVLLENEANQLLTDTALQIPAEIGITDVVPAFGRTEEPINGQDAIRIWESFTTGLGFTYTVDSPQKQKYKIIYRIANNLSASTVSLTYNNQTFFTDILNTSLDPNGVRGNYGSYTLVEGPIIEFSQGTNIFKLRSQKGEFAIDSIIFSPVV

SEQ ID NO: 319 - protein, 726 aa, Bacillus thuringiensis B0195
MEKFSNFSEQKYPDSNNNQELTVESSSFYSNTINENVKNHHPIEQDILKFTNQEFSDNHYQHSDVSNDINSMRNTLCRDLPPETNMSIYDNLRSTVTVPSFSNQFDPIKFLHDIEIAIQTGSFSALTQSNMNQGGTDINPMLISTFFKVASSLLPFPLSSLGALASFYITDSQTGAMANLWRQMVDYVEKRIDSKILDYHNFIMGAELAALNASLKEYARVVKIFENDMNRMAEPPSTGVITQFRILNDNFIKYIAKLQFSTNQSDLQYPVLTLPLRAQACVMHLMLLKDATTSVWGQQIDSQQLNGYKAELIRLIKVYTNDVKTTYNQGLELEKAKPLNYSDPEEYLQAGRPDISVLRSNFKEVMKWNRVAKYKRGMAMSALSLAALFPTFGPNYPKQALKVVQSRQIFAPVIGIPGGITSQDHSGTFGSMRFDVKTYDQIDALRRLMELYIQPLKSAYFWIYESDWKVRATYVNDYIGKRGSDTGAAWHMWSSDPSVIYTSALGAAGYAPNVVGVRYSHGGSYTKGMAPANTNAYAPFEFKYPGYKLHSVSAYGLSKAPNAADSVMFGFRPVLLENEANQLLTDTALQIPAEITEKIPNVSLDNYLVEETINGQNAIQLWEPTFPGDPKNRFNYTINSPREQNYKIIYRIASNEPAQISLTYNSKFLTDIPNTSLDPNGVKGNYGFYTLIEGPIIRFSSGTNIFSIRSEINTFAIDSIIFSPVS

SEQ ID NO: 320 - protein, 726 aa, Bacillus thuringiensis 31-5
MDPFSNYSEQKYPDSNNNQELTVESSSFYSNTINENVKNHHPIEQDILKFTNQEFSDNHYQHSDVSNDINSMRNTLCRDLPPETNMSIYDNLRSTVTVPSFSNQFDPIKFLHDIEIAIQTGSFSALTQSNMNQGGTDINPMLISTFFKVASSLLPFPLSSLGALASFYITDSQTGAMANLWRQMVDYVEKRIDSKILDYHNFIMGAELAALNASLKEYARVVKIFENDMNRMAEPPSTGVITQFRILNDNFIKYIAKLQFSTNQSDLQYPVLTLPLRAQACVMHLMLLKDATTSVWGQQIDSQQLNGYKAELIRLIKVYTNDVNTTYNQGLELEKAKPLNYSDPEEYLQAGRPDISVLRSNFKEVMKWNRVAKYKRGMAMSALSLAALFPTFGPNYPKQALKVVQSRQIFAPVIGIPGGITSQDHSGTFGSMRFDVKTYDQIDALRRLMELYIQPLKSAYFWIYESDWKVRATYVNDYIGKRGSDTGAAWHMWSSDPSVIYTSALGAAGYAPNVVGVRYSHGGSYTKGMAPANTNAYAPFEFKYPGYKLHSVSAYGLSKAPNAADSVMFGFRPVLLENEANQLLTDTALQIPAEITEKIPNISLDNYLVEETINGQNAIQLLEPTFPGDPKNRFNYTINSPREQNYKIIYRIASNEPAQISLTYNSKFLTDIPNTSLDPNGVKGNYGSYTLIEGPIIRFSSGTNIFSIRSEINTFAIDSIIFSPVS

SEQ ID NO: 321 - protein, 777 aa, Bacillus thuringiensis 87-29
MDPFSSYSEQKYPDSNNNQELITKSSSFYSDTTNENAKNYHPIEQDILKFTNQEFSDNPYQHSDVSNSYENKKKEIINIDLPYNTNDINSMRNTLCRDLPPETNMSIYDNLRSTVTVPSFSNQFDPIKFLHDIEIAIQTGSFSALTQSNMNQGGTDINPMLISAFFKVAGSLLPFPLSSLGALASFYVTDSQTGAMANLWRQMVDYVEKRIDSKILDYHNFIMGAELAALNASLKEYARVVKIFENDMNRIAEPPSTGVITQFRILHDNFIKYIAKLQFSTNQSDLQYPVLTLPLRAQACVMHLMLLKDATTSVWGQQIDSQQLNGYKAELIRLIKVYTNDVNTTYNQGLELEKAKPLNYSDPEEYLQAGRPDISVLRSNFKEVMKWNRVAKYKRGMAMSALSLAALFPTFGPNYPKQALKVVQSRQIFAPVIGIPGGITSQDHSGTFGSMRFDVKTYDQIDALRRLMELYIQPLKSAYFYIYESDWKVRATYVNDYIGKRGSNTGLAWGMWSSDPSVIYTSALGAAGYAPNVVGVRYSHGGSYTKGMAPPNTNAYAPFEFKYPGYKLHSVSAYGLSKAPDAADSVMFGFRPVLLENEANQLLTDTALQIPAEIGITDVVPAFGRTEEPINGQDAIILKKITRGPIPGGSTDCSPWELTHGMCEIDPGPPVPPGPPVPLPHRINYTINSPESGKEYTIWYRLASNQNSLIALQHRISQYDTNISNTQQDTNSVKGNYGYYTLIKGPTLVLFKGENIISLGMLSGEIALDSIIFSPVS

SEQ ID NO: 322 - protein, 633 aa, Bacillus thuringiensis B0462
MNSVLNSGRTTICDAYNVAAHDPFSFQHKSLDTVQKEWTEWKKNNHSLYLDPIVGTVASFLLKKVGSLVGKRILSELRNLIFPSGSTNLMQDILRETEKFLNQRLNTDTVARVNAELTGLQANVEEFNRQVDNFLNPNRNAVPLSITSSVNTMQQLFLNRLPQFQMQGYQLLLLPLFAQAANLHLSFIRDVILNADEWGISAATLRTYRDYLKNYTRDYSNYCINTYQSAFKGLNTRLHDMLEFRTYMFLNVFEYVSIWSLFKYQSLLVSSGANLYASGSGPQQTQSFTSQDWPFLYSLFQVNSNYVLNGFSGARLSNTFPNIVGLPGSTTTHALLAARVNYSGGISSGDIGASPFNQNFNCSTFLPPLLTPFVRSWLDSGSDREGVATVTNWQTESFETTLGLRSGAFTARGISNYFPDYFIRNISGVPLVVRNEDLRRPLHYNEIRNIASPSGTPGGARAYMVSVHNRKNNTHAVHENGSMIHLAPNDYTGFTISPIHATQVNNQTRTFISEKFGNQGDSLRFEQNNTTARYTLRGNGNSYNLYLRVSSIGNSTIRVTINGRVYTATNVNTTTNNDGVNDNGARFSDINIGNVVASSNSDVPLDINVTLNSGTQFDLMNIMLVPTNISPLY

SEQ ID NO: 323 - protein, 758 aa, Bacillus thuringiensis MO19
MSVVYYVKGGDIVDPFSNYSEQKYPDSNNNQELITESSSFYSDTTNENMKTYHPIEQDILKFANQEFPDNYYQHSDVSNSYQNMKTEIVNTDLPYNTNNINSMRNTLCRDLPPETNMSIYDNLRSTVTVPSFSNQFDPIKFLHDIEIAIETGSFSALTQSNMNQGGTDIAPMLISTFFKVAGSLLPFPLSSLGALASFYVTDSQTGAMANLWRQMVDYVEKRIDSKILDYHNFIMGAELAALNASLKEYARVVKIFENDMNRIAEPPSTGVITQFRILNDNFIKYIAKLQFSTNQSDLQYPVLTLPLRAQACVMHLMLLKDATTSVWGQQIDSQQLNGYKAELIRLIKVYTNDVNTTYNQGLELEKAKPLNYSDPEEYLQAGRPDISVLRSNFREVMKWNKVAKYKRGMAMSALSLAALFPTFGPNYPKQALKVVQSRQIFAPVIGIPGGITSQDHSGTFGTMRFDVQTYDQIDALRQLMELYIQPLKSAYFYIYESDGKVRATYVNDYIGKRGSNTGAAWGMWSSDPSAIYTSALGAAGYAPNVVGVRYSNGGSYTKGMAPANTNAYAPFEFKYPGYKLHSVSAYGLSKAPDAADSVMFGFRPVLLENEANQLLTDIALQIPAEIALTRPNLNINQLLVEETINGQNALQLWEPNFPGDSTNIFNYNINSPREQNYKIIYRIASNSPAQISLNYNSKFFLTDIPNTSLDPNGVKGTYGSYTLIEGPIIRFSPGANIFSISSEINTFAIDSIIFSPVS

SEQ ID NO: 324 - protein, 1236 aa, Bacillus thuringiensis yunnanensis
MDPNDHNEYEVMDTGSMGYQPRYPLANAPGAELQQMHYKDWMDMCTYGESVALSEGLRAALFVANSIIGIMLSKIPIVGPIVSTPFQIMGVALPFLWPPNAPEPQFSWESLMTAAEEIADKKIDAQVRANANAELEGVHNAIRLYQDAVCDWKQDPTNAQLKEQLRIQYIATNTVIFSRMPSFRVRGFEVPLLSTYVQAANLHLIHLKDGVQFGEEWGMDSATVDRFYSYLKSDIEIYTNYCIDWYNKGLSDSIESEPTWNGWNTFNNFRRDMTLMVLDLVSIWPTYDPRRYPLPTKSQLTRELYTQAIGSYKSVEPLLPPPSPFRWLREIEFFLRDSQDEAEQFAGFQQGYQYTLDTTIYRPPVVGTRTSLVDSIAMGLGSDDVVYRIKNISHNGWYPKKLDFYYTPSERVESVGEIRTDANNMIDYIGLGCRAKVTEPCDPCTTNCTIDTVNTTASCDNPNLYSHRLSSINPSAPYPGQNGMLSFCYGWTHFSVDDNNLIAADSITQIPAVKAYRIGGYGKVMKGPGYTGGDLMVFYGAGEINWRLTIPDTTKAYRVRARVATIPTSQPVDTVRYNQFEYRDIEVISPTTTVHEYSIGFDITGDDWGLLDKIEFIPIEGPVEAYQADQALEKARKAVNALFTNDAKNALQLKVTDYSVDQAANLIECVSDAFHSQEKMILLDQIKYAKRLSQARNLLNYGDFESSDWSGENGWRTSPHVHVASNHPIFKGRYLHMPGATSSQFSNHIYPTYVYQKVDESKLKSYTRYLVRGFVGNSKDLELLVERYGKDVHVEMDVPNDIRYALPTNECGSLDRCRPASYQARTPHTCTCKDTTSMHTDCQCQNKVNRTSADMYTNGSPSSVMYADGFHAHKSCGCKNNDMYPNGTDSHKSCRCKDPHVFSYHIDTGCVDQEESLGLWFALKIASENGVANIDNLEIIEAQPLTGEALARVKKREQKWKQEMTKKRLETEKAVQAAQSAIQNLFTNAQHNRLKFETLFPQIVHAEKLVEQIPYVHHPFLSGALPTVPGMNFEIIQQLLAVIGNARALYEQRNLVRNGTFSSGTGSWKVTEGVKVQPLQDTSVLVLSEWIHEASQQLHIDPNRGYVLRVTARKEGGGKGTVTMSDCADYTETLTFTSCDFNTSGSQTMTSGTLSGFVTKTLEIFPDTDRIRIDIGETEGTFQVESVELICMEQMEEDLYDIAGNVVEEMRYLDSSRSMGGTLDAMCYTKIGEFGC

SEQ ID NO: 325 - protein, 1270 aa, Bacillus thuringiensis
MNQNDNKNEYEILDSGNLSYQPRYPLANAPGSKLQNMGYKEWRDMCPDAKRQLLKQIGISPFEPDEWTKVGQSLTISAGLVAAIAGVASVAFPPLAIVAGAFAIISMFFDVLWPESENNTNSQVVWADFAAAAEEMMDEKIADEIKAEAVLQLRIVQSRLRDYQQAACNFQSDPNNESYKALLRDAFDDADDALKEVMILFSREGYEQLLLFDYVQAANLHLLLLKDVVRFGVGWGFPPGRVEQYYSNPTNLGNPGMVQLLAKYTNYSTSLCWKGIEERKWMVESEYRSNNEEYYAYRSNMTMMVLDMVALWPTYDPVKYPYATAVELTREIYSLIAGGFRDYKGYMPIQYTWEKPGSLVTNLERFTIYTWKNFEYFPFAGVETTYQTIGTGSSSTKQAGVIPSPEEGTAWTTPGINVEYHLVESFIYGTLTQLLFYDVYNTPAFKAGSDAVEVPGSIAGTPCKNIPLDANDVNVCVPTLWEESPANPEGVCYPYNREMQSNLLSEVIPEDPKLLTLPHVPPLGYIDAFAFAWRSTTCDTRYNLIPANKIGQIPAVKGNWLGQSGSSVVRTSGNTGGDVVRLYEFGNLGMTVRFSENRSYIIRLRYATVADDLNIIVRVQRRGELEYESELPLNQTSNNSTTQWKFEDYGYQEVGGFYPQVGEEYELWFSPVGTELSSHMDIDKIEFIPMETSLEEYLANQDIEKARKAVNALFTGDVKNALKLNVTDYAIDQAANLVECVSEEFYAQEKMILLDQVKVAKRLSQARNLLNYGDFESPEWSRENGWKTSRHVSVRADNPVFKGRYLHMPGVTSPSFSNNTYPTYVYQKVDESKLKSYTRYLVRGFVGNSKDLELLVERYGKDVHVEMDVPHDIRYSLQTNECGGFDRCRPVSYLARSSHACTCKDTASMHTDCQCQNKANRTVTNMYTNVSPGSAMYTDGFHAQKSCGCKNNDMYQNGTHPHKSCGCKDPHVFSYHIDTGCVDPEENLGLWFALKIAGENGVANIDNLEIIEAQPLTGEALARVKKREQRWKQERDKKRLETEKAVQTAQGAIQNLFTNTQQNLLKFETLFPQIVNAEMLVQQIPYVYHPFLSGALPAVAGMNFKIVQQLSATIGNARSLYNQRNLVQNGTFSSGTGSWHVSEGVEVQPLQNTSVLVLSEWSHEASQQVSVDPDRGYVLRVTARKEGVGKGTVTLSDCADYTETLTFTSCDFNTSGSQTMTSGTLSGFVTKTLEIFPDTDRIRIDIGETEGTFKIESVELICMEQMEDDL

SEQ ID NO: 326 - protein, 1254 aa, Bacillus thuringiensis
MNSNYNNEHEILDMNNRSYQTRYPLANAPGVELQQMSYKDWMDRCEQESLAITFKSVITTALDITSAILGAAKSPKAKVARAAVQVLNTVIKLLWPDPEKPSEPAYDIDFIWKELIGRVEILIEEKIDREAYNAAIGRLSGLKRALSLYQESFETWIDDENDPELQEDVRMRFTSTLFELVTTIETFKYSGQELNLLTVFVQAADFHLMLLQQGVMYGVRWGFDQRTVDSFYQNDRGEGLKNLLPKYSDYCTYWYDQGLNRAKNLKANLSDTVRYPWAANLENMSVLQELEDWNLYNDYRRDMTILVLDLVAVWPTYDLHYYDNGNYGVQSELTRSIYSQAVGNVMGTVFTKEQYEVSFVRPPHLVTWLEKMFIQIRPTEQGAPIDATMAGVSLYYSYSGWDNTVDDILLGYPTYSSSEIRVLSKSKVIVQDQEKNRAIYNTDLQHDKLVDRFVFYQNSGEVNYAGRDNPSSYKTFAWDTDITNYSSQMTWINGPVNEGHFGYIQAYAPEWIPASCEPFNNIVDAEDVITQIPAVKARELRYGARVIKGVGNTGGDLVSIAPHGLCELYVSFPNVVRRYQVRIHYACQDPTKINLNIGDSRHDITLPSTYSGGALTYDSFGYATSEYSYLFYADFYDEKQIVRLGNSFDISQQDVIIDKIEFIPVDIFYAEEQDLEKARKAVNALFTNDAKNALQLDVTDYAVDQAANLVECVSDEFHAQEKMILLDQVKFAKRLSQARNLLNYGDFESSDWSGENGWRTSPHVHVASDNPIFKGRYLHMSGAMSPQFSNNIYPTYAYQKVDESKLKSYTRYLVRGFVGNSKDLELLVERYGKDVYVEMDVPNDIRYTLPRNECGDFDRCKPASYQTKPPHTCTCKDPAVAHTDCQCKDKGNHTSTNMYTNGPTGSEVSTNGFHAHKSCGCGDKHMDKSGTHPHKSCGCKDPHVFTYHIDTGCVDTEENLGLFFALKIASENGVANIDNLEIIEAQPLTGEALARVKKREQRWKQEMTKKRLETETAVQAAQDAIQNLFTNTQYNRLKFETLFPHIVNAELLVQQIPYVYHPFLSGALPVVPGMNFDIFQQLSFLIDTAKRLYEARNLVQNGTFSSGTGSWYVTAGVEVHRLQNTSVLVLSEWSHEASQQVRIDSDRGYVLRVTARKEGAGKGTVTLSDCADYTETLSFTSCDYNTVGTQTMTKGTLSGFVTKTLENFPDTDRIRIDIGETEGTFKVESVELICMEQMEDHLYDMAGNLEQDLT

SEQ ID NO: 327 - protein, 1280 aa, Bacillus thuringiensis
MKQNYNDEYDIIDNGGRGDQSRYPLTNAPSAELQDMNYIEWLDNCTLKEQVELFRDTSTTVRDALATTAGIITALLSVSNPAAAATAGIITILIPQLWPSGSDEVTWEKFMAAAEILIQKQITEAVRNKALTELEGVYRTIRLYQLAAERWNQNKNDPQAQESIRTQFRATNTIIEFAMPSFRVAGFEVPLLNVYAEAANLQLALLRDAVKFGRDWGLPQDEVDDIYSEQLLPRIAEHTDHCVTYFNRGLEEAKKLKANLNDYARYPWAQYINHSKIQGIENWNLFNDYRRNMTILVLDLVALWPTYDPRRYSMVTKSELTRELYTSVRGAFYGHNNDYDQNFEEIERNIISPPHLVTWPINFTVYTQNDYYYPMAGLQHKFNYTESIVSLESPVTGVTGTSNLINFVTADPFILAVTIIGFGQLGTSLGIYAMSFGRKSGSISHVGDIEIGTDDYLDIVDRIPVGDSTPNKLSWMSAAPTTLGSTTFLQYVSYAWRHPSVDSNNRISIDKITQIPAVKAFFIDDNHVKVIKGPGSTGGDLVAFSREGYGLSISVFIPGSDLVSFYRVRIRYASSQSAKVTMGFGGGVEESESKFNFPATYSGGNLTYNSFGYINTLAIASQSTAQTIEVYFRQYEEAEFIVDKLEFIPMEMSLEEYQADQDLEKARKAVNALFTSDAKSELKVNITDYAVDQAANLVECVSEDFHAQEKRILLDQVKFAKRLSQARNLLNYGDFESLDWSGENGWRTSPHVHVASDNPIFKGRYLHMPGAMSPQYSNNTYPTYAYQKVDESKLKSYTRYLVRGFVGNSKDLELLVERYGKEVHVEMDVPNDIRSTLPMNECGGFERCGKVSYQAVSDHTCTCKDTARMNTDCQCKDKINHMTTGVYTSMPVGSAMYPDGYHAHKSCKCGDKTMYGNGKHPHKSCGCKDPHVFSYHIDTGCVDQEENLGLWFALKIASENGVANIDNLEIIEALPLTGEALARVKKREHKWKQEMEQKRCKTEEAVQAAQTAINTLFTNTQYNRLKFETLFPHILHADELVQRIPYVYHPFLLGAYPDVPGMNYDIFQQLSALVNQARGLYDMRNLVRNGTFSAGIGNWQVTDGVATQPEGNTSVLILREWSDKAIQHLRIHAERGYVLRVTARKEGNGDGYVVIHDCDNQQEKLTFTACDYTTMGSSTGTQTMMTSPTNCMPCNSTTWKEEMKALVPMLSGYVTKTAEIFPDTDRIHIEIGETEGTFKIESVELICMEHMEEHAYDMEGDIEANIPPIVRPPIMPPTNV

SEQ ID NO: 328 - protein, 310 aa, Bacillus thuringiensis dakota
MAIIDFNQKIKDFCQWQVSNEFNPGRDLRNWVISYENTNISAVPRGASGGVATVNVTPVLKVASTQELYNGSSVTQSQTARFSETTQETQSSTTTEGARFSSTVTSTTKFTANVNFKAIGSGIDQTIAVAVTGEYNYSSSQTITTQRTRVWDVTQPVIVPPRTRIVATLLIYDAPFSIPIDLNCEVTGKIPINNGFSQDLAGATYDYTIGTNTRASSYTRLGMMAYYNWPGKVPEFVGYQSAGRAAFATLVYRGVGLQTAVQGLYSVVKFEEFPIGRQGETRTYYSPIQLADQNTSLAPDSNTIPIINPM

SEQ ID NO: 329 - protein, 119 aa, Bacillus thuringiensis PS80JJ1
MSAREVHIEINNKTRHTLQLEDKTKLSGGRWRTSPTNVARDTIKTFVAESHGFMTGVEGIIYFSVNGDAEISLHFDNPYIGSNKCDGSSDKPEYEVITQSGSGDKSHVTYTIQTVSLRL

SEQ ID NO: 330 - protein, 119 aa, Bacillus thuringiensis EG5899; identical to SEQ ID NO: 329

SEQ ID NO: 331 - protein, 119 aa, Bacillus thuringiensis PS69Q; identical to SEQ ID NO: 329

SEQ ID NO: 332 - protein, 119 aa, Bacillus thuringiensis PS185GG; identical to SEQ ID NO: 329

SEQ ID NO: 333 - protein, 123 aa, Bacillus thuringiensis PS149B1
MSAREVHIDVNNKTGHTLQLEDKTKLDGGRWRTSPTNVANDQIKTFVAESNGFMTGTEGTIYYSINGEAEISLYFDNPFAGSNKYDGHSNKSQYEIITQGGSGNQSHVTYTIQTTSSRYGHKS

SEQ ID NO: 334 - protein, 123 aa, Bacillus thuringiensis PS167H2
MSAREVHIDVNNKTGHTLQLEDKTKLDGGRWRTSPTNVANDQIKTFVAESHGFMTGTEGTIYYSINGEAEISLYFDNPYSGSNKYDGHSNKNQYEVITQGGSGNQSHVTYTIQTVSSRYGNNS

SEQ ID NO: 335 - protein, 123 aa, Bacillus thuringiensis EG9444
MSAREVHINVNNKTGHTLQLEDKTKLDGGRWRTSPTNVANDQIKTFVAESHGFMTGTEGHIYYSINGEAEISLYFDNPYSGSNKYDGHSNKPQYEVTTQGGSGNQSHVTYTIQTASSRYGNNS

SEQ ID NO: 336 - protein, 123 aa, Bacillus thuringiensis KR1369
MSAREVHIDVNNKTGHTLQLEDKTKLDGGRWRTSPTNVANDQIKTFVAESHGFMTGTEGTIYYSINGEAEISLYFDNPYSGSNKYDGHSNKPQYEVTTQGGSGNQSHVTYTIQTASSRYGNNS

SEQ ID NO: 337 - protein, 132 aa, Bacillus thuringiensis EG4851
MSAREVHIEIINHTGHTLQMDKRTRLAHGEWIITPVNVPNNSSDLFQAGSDGVLTGVEGIIIYTINGEIEITLHFDNPYAGSNKYSGRSSDDDYKVITEARAEHRANNHDHVTYTVQRNISRYTNKLCSNNS

SEQ ID NO: 338 - protein, 132 aa, Bacillus thuringiensis PS201L3
MSAREVHIEIINHTGHTLQMDKRTRLAHGEWIITPVNVPNNSSDLFQAGSDGVLTGVEGIIIYTINGEIEIPLHFDNPYAGSNKYSGRSSDDDYKVITEARAEHRANNHDHVTYTVQRNISRYTNKLCSNNS

SEQ ID NO: 339 - protein, 132 aa, Bacillus thuringiensis PS201HH2; identical to SEQ ID NO: 337

SEQ ID NO: 340 - protein, 385 aa, Bacillus thuringiensis PS80JJ1
MLDTNKVYEISNLANGLYTSTYLSLDDSGVSLMSKKDEDIDDYNLKWFLFPIDNNQYIITSYGANNCKVWNVKNDKINVSTYSSTNSVQKWQIKAKDSSYIIQSDNGKVLTAGVGQSLGIVRLTDEFPENSNQQWNLTPVQTIQLPQKPKIDEKLKDHPEYSETGNINPKTTPQLMGWTLVPCIMVNDSKIDKNTQIKTTPYYIFKKYKYWNLAKGSNVSLLPHQKRSYDYEWGTEKNQKTTIINTVGLQINIDSGMKFEVPEVGGGTEDIKTQLTEELKVEYSTETKIMTKYQEHSEIDNPTNQPMNSIGLLIYTSLELYRYNGTEIKIMDIETSDHDTYTLTSYPNHKEALLLLTNHSYEEVEEITKIPKHTLIKLKKHYFKK

SEQ ID NO: 341 - protein, 385 aa, Bacillus thuringiensis EG5899
MLDTNKVYEISNLANGLYTSTYLSLDDSGVSLMSKKDEDIDDYNLKWFLFPIDNNQYIITSYGANNCKVWNVKNDKINVSTYSSTNSVQKWQIKAKDSSYIIQSDNGKVLTAGVGESLGIVRLTDEFPENSNQQWNLTPVQTIQLPQKPKIDEKLKDHPEYSETGNINPKTTPQLMGWTLVPCIMVNDSGIDKNTQIKTTPYYIFKKYKYWNLAKGSNVSLLPHQKRSYDYEWGTEKNQKTSIINTVGLQINIDSGMKFEVPEVGGGTEDIKTQLTEELKVEYSTETKIMTKYQEHSEIDNPTNQPMNSIGLLIYTSLELYRYNGTEIKIMDIETSDHDTYTLTSYPNHKEALLLLTNHSYEEVEEITKIPKHTLIKLKKHYFKK

SEQ ID NO: 342 - protein, 385 aa, Bacillus thuringiensis PS69Q; identical to SEQ ID NO: 341

SEQ ID NO: 343 - protein, 385 aa, Bacillus thuringiensis PS185GG; identical to SEQ ID NO: 340

SEQ ID NO: 344 - protein, 383 aa, Bacillus thuringiensis PS149B1
MLDTNKVYEISNHANGLYAATYLSLDDSGVSLMNKNDDDIDDYNLKWFLFPIDDDQYIITSYAANNCKVWNVNNDKINVSTYSSTNSIQKWQIKANGSSYVIQSDNGKVLTAGTGQALGLIRLTDESSNNPNQQWNLTSVQTIQLPQKPIIDTKLKDYPKYSPTGNIDNGTSPQLMGWTLVPCIMVNDPNIDKNTQIKTTPYYILKKYQYWQRAVGSNVALRPHEKKSYTYEWGTEIDQKTTIINTLGFQINIDSGMKFDIPEVGGGTDEIKTQLNEELKIEYSHETKIMEKYQEQSEIDNPTDQSMNSIGFLTITSLELYRYNGSEIRIMQIQTSDNDTYNVTSYPNHQQALLLLTNHSYEEVEEITNIPKSTLKKLKKYYF

SEQ ID NO: 345 - protein, 383 aa, Bacillus thuringiensis EG9444
MLDTNKVYEISNHANGLYAATYLSLDDSGVSLMNKNDDDIDDYNLKWFLFPIDDDQYIITSYAANNCKVWNVNNDKINVSTYSSTNSIQKWQIKANGSSYVIQSDNGKVLTAGTGQALGLIRLTDESSNNPNQQWNLTSVQTIQLPQKPIIDTKLKDYPKYSPTGNIDNGTSPQLMGWTLVPCIMVNDPNIDKNTQIKTTPYYILKKYQYWQRAVGSNVALRPHEKKSYTYEWGTEIDQKTTIINTLGFQINIDSGMKFDIPEVGGGTDEIKTQLNEELKIEYSRETKIMEKYQEQSEIDNPTDQPMNSIGFLTITSLELYRYNGSEIRIMQIQTSDNDTYNVTSYPDHQQALLLLTNHSYEEVEEITNIPKSTLKKLKKYYF

SEQ ID NO: 346 - protein, 383 aa, Bacillus thuringiensis PS167H2
MLDTNKIYEISNYANGLHAATYLSLDDSGVSLMNKNDDDIDDYNLRWFLFPIDDNQYIITSYAANNCKVWNVNNDKINVSTYSSTNSIQKWQIKANASSYVIQSNNGKVLTAGTGQSLGLIRLTDESPDNPNQQWNLTPVQTIQLPPKPTIDTKLKDYPKYSQTGNIDKGTPPQLMGWTLIPCIMVNDPNIDKNTQIKTTPYYILKKYQYWQQAVGSNVALRPHEKKSYAYEWGTEIDQKTTIINTLGFQINIDSGMKFDIPEVGGGTDEIKTQLNEELKIEYSRETKIMEKYQEQSEIDNPTDQSMNSIGFLTITSLELYRYNGSEISVMKIQTSDNDTYNVTSYPDHQQALLLLTNHSYEEVEEITNIPKISLKKLKKYYF

SEQ ID NO: 347 - protein, 387 aa, Bacillus thuringiensis EG4851
MIETNKIYEISNKANGLYATTYLSFDNSGVSLLNKNESDINDYNLKWFLFPIDNNQYIITSYGVNKNKVWTANGNKINVTTYSAENSAQQWQIRNSSSGYIIENNNGKILTAGTGQSLGLLYLTDEIPEDSNQQWNLTSIQTISLPSQPIIDTTLVDYPKYSTTGSINYNGTALQLMGWTLIPCIMVYDKTIASTHTQITTTPYYILKKYQRWVLATGSGLSVPAHVKSTFEYEWGTDTDQKTSVINTLGFQINTDTKLKATVPEVGGGTTDIRTQITEELKVEYSSENKEMRKYKQSFDVDNLNYDEALNAVGFIVETSFELYRMNGNVLITSIKTTNKDTYNTVTYPNHKEVLLLLTNHSYEEVTALTGISKERLQNLKNNWKKR

SEQ ID NO: 348 - protein, 387 aa, Bacillus thuringiensis PS201L3; identical to SEQ ID NO: 347

SEQ ID NO: 349 - protein, 387 aa, Bacillus thuringiensis PS201HH2; identical to SEQ ID NO: 347

SEQ ID NO: 350 - protein, 520 aa, Bacillus thuringiensis
MNVNHGMSCGCGCQQGKEEYNDYHVSNEYRDENPSTTCNSQQGNYEYEQSKETYNNDYQSYEYNQQNYNTCGRNQGTMEQESMQKDRNWENANYSGYDGCSPNQLNALNLPDESTRFQKITNVNTRDSHRVLDMMDVPSGTRLDTRVPPICSQTEFTNTVSNELVSTNHDTQFLIFYQTDDSSFIIGNRGNGRVLDVFPSNRNGYTIVSNVYSGSRNNQRFRMNKASNNQFSLQTIFKDRVNICGHIHNFNAIITATTLGENDSNALFQVQSSTNITLPTLPPRTTLEPPRALTNINDTGDSPAQAPRAVEGSVLIPAIAVNDVIPVAQRMQESPYYVLTYNTYWHRVISAILPGSGQTTRFDVNLPGPNQSTMVDVLDTAITADFRLQFVGSGRTNVFQQQIRNGLNILNSTTSHRLGDETRNWDFTNRGAQGRLAFFVKAHEFVLTRANGTRVSDPWVALDPNVTAAQTFGGVLLTLEKEKIVCASNSYNLSVWKTPMEIKNGKIYTKNEWNTKPNYK

SEQ ID NO: 351 - protein, 126 aa, Bacillus thuringiensis
MTVYNATFTINFYNEGEWGGPEPYGYIKAYLTNPDHDFEIWKQDDWGKSTPERSTYTQTIKISSDTGSPINQMCFYGDVKEYDVGNADDILAYPSQKVCSTPGVTVRLDGDEKGSYVTIKYSLTPA

SEQ ID NO: 352 - protein, 310 aa, Bacillus thuringiensis
MSILNLQDLSQKYMTAALNKINPKKVGTFHFEEPIVLSESSTPTRSEIDAPLNVMFHASQDLDNRRGTSDLKQTVSFSQTQINTVETKTTDGVKTTKEHTFSGTLELKIKYAMFDLGGVSGTYQYKKSTENDISSEKSKSKSDSQTWSISSEYTVKPGVKETLDFYIVGIKTEVPLNIFAEFQGTKTIDNVSNVMAYQEFISQDDEHIRACMKASKLANPDHLSGYTAPKELKANTSKGSVEFRGTAIAKINTGVKCLVVVNGKNSITGKTYSYIHPKTMLADGTIEYLESEIDLLESEIDLLTTSSILV

SEQ ID NO: 353 - protein, 660 aa, Bacillus thuringiensis aizawai
MNSYENKNEYEILNDSKKSNMSNPYLRYPLANDSLASMQNTNYKDWLTMCDRTDTDVLSSRGAVSTGVGMLSTILSLFGIPLIGEGIDLLLGAADFLWPESDGGHQYTWEDLMNHIEELMDERLETEKRTTALDDLRGLKALLGLFRDAFDSWEKNQNDPIAKNRVGGYFEDVHTHFVKDMASIFSATNYEVLLLPVYAQAANLHLLLLREGVIYGSRWGIAPAADFYHDQLLKYTAIYANHCVTWYNNGLAQQKELFAKSPNWNRFNAYRRDMTITVLDIIALFPTYDARLYTKPIKTELTREIYSDVLNLDVYGVQQTDLNKNEAAFTRSPHLVTRLRGFDFYTRTKYAYWRYLAGHTNYFSFTGNGTIYSSSFNNWYDTDMTKSTINIPDYANIYKLWTKSYTNISPYTDPVGISQMQFSLTNNQQLTYTGTSAPKYPVRETFFEIPPTDEKPLTYENYSHILSYMTSAQHFGDKKIGYTFAWMHESVDFDNRVDPDKITQIPAVKGDYLQYGYVKQGPGHTGGDLVSMIRTDRLGINVYFPQPLDYRIRIRYSTSSNGYLYIYSPNTKIVYLPPTTLVDGQPTFDPMDFSAFRVVEVPASFRASVAGYTNFTIEAGFGPVYIDKIEFIPDNTTTLEYEGGRDLEKTKNAVNDLFTN

SEQ ID NO: 354 - protein, 652 aa, Bacillus thuringiensis san diego
MIRKGGRKMNPNNRSEHDTIKTTENNEVPTNHVQYPLAETPNPTLEDLNYKEFLRMTADNNTEALDSSTTKDVIQKGISVVGDLLGVVGFPFGGALVSFYTNFLNTIWPSEDPWKAFMEQVEALMDQKIADYAKNKALAELQGLQNNVEDYVSALSSWQKNPVSSRNPHSQGRIRELFSQAESHFRNSMPSFAISGYEVLFLTTYAQAANTHLFLLKDAQIYGEEWGYEKEDIAEFYKRQLKLTQEYTDHCVKWYNVGLDKLRGSSYESWVNFNRYRREMTLTVLDLIALFPLYDVRLYPKEVKTELTRDVLTDPIVGVNNLRGYGTTFSNIENYIRKPHLFDYLHRIQFHTRFQPGYYGNDSFNYWSGNYVSTRPSIGSNDIITSPFYGNKSSEPVQNLEFNGEKVYRAVANTNLAVWPSAVYSGVTKVEFSQYNDQTDEASTQTYDSKRNVGAVSWDSIDQLPPETTDEPLEKGYSHQLNYVMCFLMQGSRGTIPVLTWTHKSVDFFNMIDSKKITQLPLVKAYKLQSGASVVAGPRFTGGDIIQCTENGSAATIYVTPDVSYSQKYRARIHYASTSQITFTLSLDGAPFNQYYFDKTINKGDTLTYNSFNLASFSTPFELSGNNLQIGVTGLSAGDKVYIDKIEFIPVN

SEQ ID NO: 355 - protein, 652 aa, Bacillus thuringiensis 886
MIRKGGRKMNPNNRSEHDTIKTTENNEVPTNHVQYPLAETPNPTLEDLNYKEFLRMTADNNTEALDSSTTKDVIQKGISVVGDLLGVVGFPFGGALVSFYTNFLNTIWPSEDPWKAFMEQVEALMDQKIADYAKNKALAELQGLQNNVEDYVSALSSWQKNPVSSRNPHSQGRIRELFSQAESHFRNSMPSFAISGYEVLFLTTYAQAANIHLFLLKDAQIYGEEWGYEKEDIAEFYKRQLKLTQEYTDHCVKWYNVGLDKLRGSSYESWVNFNRYRREMTLTVLDLIALFPLYDVRLYPKEVKTELTRDVLTDPIVGVNNLRGYGTTFSNIENYIRKPHLFDYLHRIQFHTRFRPGYYGNDSFNYWSGNYVSTRPSIGSNDIITSPFYGNKSSEPVQNLEFNGEKVYRAVANTNLAVWPSAVYSGVTKVEFSQYNDQTDEASTQTYDSKRNVGAVSWDSIDQLPPETTDEPPEKGYSHQLNYVMCFLMQGSRGTIPVLTWTHKSVDFFNMIDSKKITQLPLVKAYKLQSGASVVAGPRFTGGDIIQCTENGSAATIYVTPDVSYSQKHRARIHYASTSQITFTLSLDGAPFNQYYFDKTINKGDTLTYNSFNLASFSTPFELSGNNLQIGVTGLSAGDKVYIDKIEFIPVN

SEQ ID NO: 356 - protein, 644 aa, Bacillus thuringiensis tenebrionis Mm2
MNPNNRSEHDTIKTTENNEVPTNHVQYPLAETPNPTLEDLNYKEFLRMTADNNTEALDSSTTKDVIQKGISVVGDLLGVVGFPFGGALVSFYTNFLNTSWPSEDPWKAFMEQVEALMDQKIADYAKNKALAELQGLQNNVEDYVSALSSWQKNPVSSRNPHSQGRIRELFSQAESYFRNSMPSFAISGYEVLFLTTYAQAANTHLFLLKDAQIYGEEWGYEKEDIAEFYKRQLKLTQEYTDHCVKWYNVGLDKLRGSSYESWVNFNRYRREMTLTVLDLIALFPLYDVRLYPKEVKTELTRDVLTDPIVGVNNLRGYGTTFSNIENYIRKPHLFNYLRRIQFHTRFQPGYYGNDSFNYWSGNYVSTRPSIGSNDIITSPFYGNKSSEPVQNLEFNGEKVYRAVANTNLAVWPSAVYSGVTKVEFSQYNDQTDEASTQTYDSKRNVGAVSWDSIDQLPPETTDEPLEKGYSHQLNYVMCFLMQGSRGTIPVLTWTHKSVDFFNMIDSKKITQLPLVKAYKLQSGASVVAGPRFTGGDIIQCTENGSAATIYVTPDVSYSQKYRARIHYASTSQITFTLSLDGAPFNQYYFDKTINKGDTLTYNSFNLASFSTPFELSGNNLQIGVTGLSAGDKVYIDKIEFIPVN

SEQ ID NO: 357 - protein, 644 aa, Bacillus thuringiensis tenebrionis
MNPNNRSEHDTIKTTENNEVPTNHVQYPLAETPNPTLEDLNYKEFLRMTADNNTEALDSSTTKDVIQKGISVVGDLLGVVGFPFGGALVSFYTNFLNTIWPSEDPWKAFMEQVEALMDQKIADYAKNKALAELQGLQNNVEDYVSALSSWQKNPVSSRNPHSQGRIRELFSQAESHFRNSMPSFAISGYEVLFLTTYAQAANTHLFLLKDAQIYGEEWGYEKEDIAEFYKRQLKLTQEYTDHCVKWYNVGLDKLRGSSYESWVNFNRYRREMTLTVLDLIALFPLYDVRLYPKEVKTELTRDVLTDPIVGVNNLRGYGTTFSNIENYIRKPHLFDYLHRIQFHTRFQPGYYGNDSFNYWSGNYVSTRPSIGSNDIITSPFYGNKSSEPVQNLEFNGEKVYRAVANTNLAVWPSAVYSGVTKVEFSQYNDQTDEASTQTYDSKRNVGAVSWDSIDQLPPETTDEPLEKGYSHQLNYVMCFLMQGSRGTIPVLTWTHKSVDFFNMIDSKKITQLPLVKAYKLQSGASVVAGPRFTGGDIIQCTENGSAATIYVTPDVSYSQKYRARIHYASTSQITFTLSLDGAPFNQYYFDKTINKGDTLTYNSFNLASFSTPFELSGNNLQIGVTGLSAGDKVYIDKIEFIPVN

SEQ ID NO: 358 - protein, 644 aa, Bacillus thuringiensis tenebrionis; identical to SEQ ID NO: 357

SEQ ID NO: 359 - protein, 644 aa, Bacillus thuringiensis; identical to SEQ ID NO: 357

SEQ ID NO: 360 - protein, 644 aa, Bacillus thuringiensis tenebrionis
MNPNNRSEHDTIKTTENNEVPTNHVQYPLAETPNPTLEDLNYKEFLRMTADNNTEALDSSTTKDVIQKGISVVGDLLGVVGFPFGGALVSFYTNFLNTIWPSEDPWKAFMEQVEALMDQKIADYAKNKALAELQGLQNNVEDYVSALSSWQKNPVSSRNPHSQGRIRELFSQAESHFRNSMPSFAISGYEVLFLTTYAQAANTHLFLLKDAQIYGEEWGYEKEDIAEFYKRQLKLTQEYTDHCVKWYNVGLDKLRGSSYESWVNFNRYRREMTLTVLDLIALFPLYDVRLYPKEVKTELTRDVLTDPIVGVNNLRGYGTTFSNIENYIRKPHLFDYLHRIQFHTRFQPGYYGNDSFNYWSGNYVSTRPSIGSNDIITSPFYGNKSSEPVQNLEFNGEKVYRAVANTNLAVWPSAVYSGVTKVEFSQYNDQTDEASTQTYDSKRNVGAVSWDSIDQLPPETTDEPLEKGYSHQLNYVMCFLMQGSRGTIPVLTWTHKSVDFFNMIDSKKITQLPLVKAYKLQSGASVVAGPRFTGGDIIQCTENASAATIYVTPDVSYSQKYRARIHYASTSQITFTLSLDGAPFNQYYFDKTINKGDTLTYNSFNLASFSTPFELSGNNLQIGVTGLSAGDKVYIDKIEFIPVN

SEQ ID NO: 361 - protein, 644 aa, Bacillus thuringiensis morrisoni EG2158; identical to SEQ ID NO: 357

SEQ ID NO: 362 - protein, 644 aa, Bacillus thuringiensis tenebrionis; identical to SEQ ID NO: 357

SEQ ID NO: 363 - protein, 652 aa, Bacillus thuringiensis 22; identical to SEQ ID NO: 354

SEQ ID NO: 364 - protein, 652 aa, Bacillus thuringiensis YM-03
MIRKGGRKMNPNNRSEHDTIKTTENNEVPTNHVQYPLAETPNPTLEDLNYKEFLRMTADNNTEALDSSTTKDVIQKGISVVGDLLGVVGFPFGGALVSFYTNFLNTIWPSEDPWKAFMEQVEALMDQKIADYAKNKALAELQGLQNNVEDYVSALSSWQKNPVSSRNPHSQGRIRELFSQAESHFRNSMPSFAISGYEVLFLTTYAQAANTHLFLLKDAQIYGEEWGYEKEDIAEFYKRQLKLTQEYTDHCVKWYNVGLDKLRGSSYESWVNFNRYRREMTLTVLDLIALFPLYDVRLYPKEVKTELTRDVLTDPIVGVNNLRGYGTTFSNIENYIRKPHLFDYLHRIQFHTQFQPGYYGNDSFNYWSGNYVSTRPSIGSNDIITSPFYGNKSSEPVQNLEFNGEKVYRAVANTNLAVWPSAVYSGVTKVEFSQYNDQTDEASTQTYDSKRNVGAVSWDSIDQLPPETTDEPLEKGYSHQLNYVMCFLMQGSRGTIPVLTWTHKSVDFFNMIDSKKITQLPLVKAYKLQSGASVVAGPRFTGGDIIQCTENGSAATIYVTPDVSYSQKYRARIHYASTSQITFTLSLDGAPFNQYYFDKTINKGDTLTYNSFNLASFSTPFELSGNNLQIGVTGLSAGDKVYIDKIEFIPVN

SEQ ID NO: 365 - protein, 644 aa, Bacillus thuringiensis UTD-001
MNPNNRSEHDTIKTTENNEVPTNHVQYPLAETPNPTLEDLNYKEFLRMTADNNTEALDSSTTKDVIQKGISVVGDLLGVVGFPFGGALVSFYTNFLNTIWPSEDPWKAFMEQVEALMDQKIADYAKNKALAELQGLQNNVEDYVSALSSWQKNPVSSRNPHSQGRIRELFSQAESHFRNSMPSFAISGYEVLFLTTYAQAANTHLFLLKDAQIYGEEWGYKKEDIAEFLKRQLKLTQEYTDHFVQWYYVGLDKIRGSFYESWVNFNRYRREMTLTVLDLIALFPLYDVRLYPKEVKTELTRDVLTDPIVGVNNLRGYGTTFSNIENYIRKPHLFDYLHRIQFHTRFQPGYYGNDSFNYWSGNYVSTRPSIGSNDIITSPFYGNKSSEPVQNLGFNGEKVYRAVANTNLAVWPSAVNSGVTKVKFSQYNDQTDEASTQTSDSKRNVGAVSWDSIDQLPPEATDEPLEKGYSHQLNYVMCFLMQGSRGTIPVLTWTHKSVDFFNMIDSKKITQLPLVKAYKLQSGASVVAGPRFTGGDIIQCTENGSAATIYVTPDVSYSQKYRARIHYASTSQITFTLSLDGAPFNQYYFDKTINKGDTLTYNSFNLASFSTPFELSGNNLQIGVTGLSAGDKVYIDKIEFIPVN

SEQ ID NO: 366 - protein, 659 aa, Bacillus thuringiensis tolworthi 43F
MIRMGGRKMNPNNRSEYDTIKVTPNSELPTNHNQYPLADNPNSTLEELNYKEFLRMTADNSTEVLDSSTVKDAVGTGISVVGQILGVVGVPFAGALTSFYQSFLNAIWPSDADPWKAFMAQVEVLIDKKIEEYAKSKALAELQGLQNNFEDYVNALDSWKKAPVNLRSRRSQDRIRELFSQAESHFRNSMPSFAVSKFEVLFLPTYAQAANTHLLLLKDAQVFGEEWGYSSEDIAEFYQRQLKLTQQYTDHCVNWYNVGLNSLRGSTYDAWVKFNRFRREMTLTVLDLIVLFPFYDVRLYSKGVKTELTRDIFTDPIFTLNALQEYGPTFSSIENSIRKPHLFDYLRGIEFHTRLRPGYSGKDSFNYWSGNYVETRPSIGSNDTITSPFYGDKSIEPIQKLSFDGQKVYRTIANTDIAAFPDGKIYFGVTKVDFSQYDDQKNETSTQTYDSKRYNGYLGAQDSIDQLPPETTDEPLEKAYSHQLNYAECFLMQDRRGTIPFFTWTHRSVDFFNTIDAEKITQLPVVKAYALSSGASIIEGPGFTGGNLLFLKESSNSIAKFKVTLNSAALLQRYRVRIRYASTTNLRLFVQNSNNDFLVIYINKTMNIDGDLTYQTFDFATSNSNMGFSGDTNDFIIGAESFVSNEKIYIDKIEFIPVQ

SEQ ID NO: 367 - protein, 651 aa, Bacillus thuringiensis PGSI208
MNPNNRSEYDTIKVTPNSELPTNHNQYPLADNPNSTLEELNYKEFLRMTADNSTEVLDSSTVKDAVGTGISVVGQILGVVGVPFAGALTSFYQSFLNAIWPSDADPWKAFMAQVEVLIDKKIEEYAKSKALAELQGLQNNFEDYVNALDSWKKAPVNLRSRRSQDRIRELFSQAESHFRNSMPSFAVSKFEVLFLPTYAQAANTHLLLLKDAQVFGEEWGYSSEDIAEFYQRQLKLTQQYTDHCVNWYNVGLNSLRGSTYDAWVKFNRFRREMTLTVLDLIVLFPFYDVRLYSKGVKTELTRDIFTDPIFTLNALQEYGPTFSSIENSIRKPHLFDYLRGIEFHTRLRPGYSGKDSFNYWSGNYVETRPSIGSNDTITSPFYGDKSIEPIQKLSFDGQKVYRTIANTDIAAFPDGKIYFGVTKVDFSQYDDQKNETSTQTYDSKRYNGYLGAQDSIDQLPPETTDEPLEKAYSHQLNYAECFLMQDRRGTIPFFTWTHRSVDFFNTIDAEKITQLPVVKAYALSSGASIIEGPGFTGGNLLFLKESSNSIAKFKVTLNSAALLQRYRVRIRYASTTNLRLFVQNSNNDFLVIYINKTMNIDGDLTYQTFDFATSNSNMGFSGDTNDFIIGAESFVSNEKIYIDKIEFIPVQ

SEQ ID NO: 368 - protein, 652 aa, Bacillus thuringiensis EG4961
MNPNNRSEHDTIKVTPNSELQTNHNQYPLADNPNSTLEELNYKEFLRMTEDSSTEVLDNSTVKDAVGTGISVVGQILGVVGVPFAGALTSFYQSFLNTIWPSDADPWKAFMAQVEVLIDKKIEEYAKSKALAELQGLQNNFEDYVNALNSWKKTPLSLRSKRSQDRIRELFSQAESHFRNSMPSFAVSKFEVLFLPTYAQAANTHLLLLKDAQVFGEEWGYSSEDVAEFYHRQLKLTQQYTDHCVNWYNVGLNGLRGSTYDAWVKFNRFRREMTLTVLDLIVLFPFYDIRLYSKGVKTELTRDIFTDPIFSLNTLQEYGPTFLSIENSIRKPHLFDYLQGIEFHTRLQPGYFGKDSFNYWSGNYVETRPSIGSSKTITSPFYGDKSTEPVQKLSFDGQKVYRTIANTDVAAWPNGKVYLGVTKVDFSQYDDQKNETSTQTYDSKRNNGHVSAQDSIDQLPPETTDEPLEKAYSHQLNYAECFLMQDRRGTIPFFTWTHRSVDFFNTIDAEKITQLPVVKAYALSSGASIIEGPGFTGGNLLFLKESSNSIAKFKVTLNSAALLQRYRVRIRYASTTNLRLFVQNSNNDFLVIYINKTMNKDDDLTYQTFDLATTNSNMGFSGDKNELIIGAESFVSNEKIYIDKIEFIPVQL

SEQ ID NO: 369 - protein, 652 aa, Bacillus thuringiensis EG5144
MNPNNRSEHDTIKVTPNSELPTNHNQYPLADNPNSTLEELNYKEFLRMTEDSSTEVLDNSTVKDAVGTGISVVGQILGVVGVPFAGALTSFYQSFLDTIWPSDADPWKAFMAQVEVLIDKKIEEYAKSKALAELQGLQNNFEDYVNALNSWKKTPLSLRSKRSQDRIRELFSQAESHFRNSMPSFAVSKFEVLFLPTYAQAANTHLLLLKDAQVFGEEWGYSSEDVAEFYHRQLKLTQQYTDHCVNWYNVGLNGLRGSTYDAWVKFNRFRREMTLTVLDLIVLFPFYDVRLYSKGVKTELTRDIFTDPIFSLNTLQEYGPTFLSIENSIRKPHLFDYLQGIEFHTRLQPGYSGKDSFNYWSGNYVETRPSIGSSKTITSPFYGDKSTEPVQKLSFDGQKVYRTIANTDVAAWPNGKIYFGVTKVDFSQYDDQKNETSTQTYDSKRNNGHVGAQDSIDQLPPETTDEPLEKAYSHQLNYAECFLMQDRRGTIPFFTWTHRSVDFFNTIDAEKITQLPVVKAYALSSGASIIEGPGFTGGNLLFLKESSNSIAKFKVTLNSAALLQRYRVRIRYASTTNLRLFVQNSNNDFIVIYINKTMNIDDDLTYQTFDLATTNSNMGFSGDTNELIIGAESFVSNEKIYIDKIEFIPVQL

SEQ ID NO: 370 - protein, 649 aa, Bacillus thuringiensis kurstaki BtI109P
MNPNNRSEHDTIKATENNEVSNNHAQYPLADTPTLEELNYKEFLRRTTDNNVEALDSSTTKDAIQKGISIIGDLLGVVGFPYGGALVSFYTNLLNTIWPGEDPLKAFMQQVEALIDQKIADYAKDKATAELQGLKNVFKDYVSALDSWDKTPLTLRDGRSQGRIRELFSQAESHFRRSMPSFAVSGYEVLFLPTYAQAANTHLLLLKDAQIYGTDWGYSTDDLNEFHTKQKDLTIEYTNHCAKWYKAGLDKLRGSTYEEWVKFNRYRREMTLTVLDLITLFPLYDVRTYTKGVKTELTRDVLTDPIVAVNNMNGYGTTFSNIENYIRKPHLFDYLHAIQFHSRLQPGYFGTDSFNYWSGNYVSTRSSIGSDEIIRSPFYGNKSTLDVQNLEFNGEKVFRAVANGNLAVWPVGTGGTKIHSGVTKVQFSQYNDRKDEVRTQTYDSKRNVGGIVFDSIDQLPPITTDESLEKAYSHQLNYVRCFLLQGGRGIIPVFTWTHKSVDFYNTLDSEKITQIPFVKAFILVNSTSVVAGPGFTGGDIIKCTNGSGLTLYVTPAPDLTYSKTYKIRIRYASTSQVRFGIDLGSYTHSISYFDKTMDKGNTLTYNSFNLSSVSRPIEISGGNKIGVSVGGIGSGDEVYIDKIEFIPMD

SEQ ID NO: 371 - protein, 666 aa, Bacillus thuringiensis aizawai
NSYENKNEYEILESSSNNTNMPNRYPFANDRDMSTMSFNDCQGISWDEIWESAETITSIGIDLIEFLMEPSLGGINTLFSIIGKLIPTNHQSVSALSICDLLSIIRKEVADSVLSDAICRFLDGKLKNYREYYLPYLEAWLKDGKPLQKTNNSDIGQLVKYFELSERDFNEILGGSLARNNAQILLLPYFCASCKCQLLLLRDAVQYEEQWFPFLSAENVRSELISPNSGCDFTGDYYERLKCKIAEYTDYCEYWYQAGLNQIKQAGTGADTWAKFNKFRREMTLTVLDIIAIFQTYDFKKYPLPTHVELTREIYTDPVGYSSGTYSWLKYWTGAFNTLEANGTRGPGLVTWLRSIGIYNEYVSRYFSGWVGTRHYEDYTTGNGNFQRMSGTTSNDLRDISFPNSDIFKIESKAIMNLVGEINARPEYRVSRAEFSESTAFIYLYDAGNSGLSSMTITSKLPGIKNPEPSYRDYSHRLSNAACVGAGNSRINVYGWTHTSMSKYNLIYPDKITQIPAVKAFDISDTGPGQVIAGPGHTGGNVVSLPYYSRLKIRLIPASTNKNYLVRVRYTSTSNGRLLVERWSPSSIINSYFFLPSTGPGDSFGYVDTLVTTFNQPGVEIIIQNLDTPINVDKVEFIPVNSTALEYEGKQSLEKAQDVVNDLFVK

SEQ ID NO: 372 - protein, 666 aa, Bacillus thuringiensis serovar aizawai
MNSYQNKNEYEILKSSPNNTNIPNRYPFANDRDMSPMSWNDCQGSPWNDVWESTASFTGIGIDLITFLGEPSITGINLLFSVIGKLLPSGQNVASLSICDLLSIIRKEVDESVLSDAYGDFNGVVNNYQTYYLTSLKKWLDAGKPTTGQLLTDVTKHFEFSEREFNALLKGSLSRPKGEILLLPTYTQGANLHLLLLRDFVQYKAVWEKELRTENVESELISPSFDYEGHFKEQLAEHINHCITWYQAGLNQIKESGTSTENWLKFNKFRREMTLSVLDIIAIFPTYDFENYKSETHIELSREVYTDPVGYNGWEQNLTNGFNTLEANGTRGPGLVTWLKKIDIFTDEVTEYSGWSPVAILRGWAGTRHYEIYTGSSNTLQRISGTTSNDVSNIDFINSRIFIITSLARYALAGAAAGNPGSPRYRVSRVEFRSTGRYTFLYEVNSPGISSMTIESKLPGVKNATGFTDYFNRLSNAACVQFGTSRVNVYGWTHISMGEGNYVYPNKITQIPAVKAWEIRGTSSVVAGPGHTGGNLVKMSYHSVWSIKFTCQQLKRYRVRIRYASDGNCQLAMRRWRGGPGYVQEARHTVQRTFSGSMTYDSFKYLDIFTMPAEDYTFDLTIDLESGGALYIDKIEFIPDDLTTLEYEEERNLEKTKNAVNDLFTN

SEQ ID NO: 373 - protein, 657 aa, Bacillus thuringiensis Y41
MNSYENKNEYEILESSSNNTNMPNRYPFANDRDISPMSWNDCQGSSWEDVWESTSSLASIGIDLIDHMFIAGPSITSINLLFSIIGKLIPSSGQSISSLSICDLLSIIRKEVDESVLSGAYGDFNGVLANYRDYYLKSLKTWLDEGQPTTGQSLKDVTKHFEASEREFNALLQGSLSRPKGEILLLPTYAQGANFHLLLLRDFVQYKDAWANELRTENVESELISPTFDYEGRFKEQLAKHINHCIYWYQAGLDQIKQGGTGADIWTKFNKFRREMTLSVLDIIAIFPTYDFEKYPLPTHVELTREIYTDAVGYSSGTYSWLRNWPNTFNALEANGTRGPGLVTWLSKIGIYNEYVSRYFAGWVGTRHYEDYTKGNGIFQRMSGTTSNDLRNIDFQNADVYKITSLAIMNLVGETTARPEYRVSKADFRRVGGPDLNYDAGNNGLSRMTIESTFPLVLDSNGVRGPSHRLSNAACVVYGNSRVNVFGWTHTSMTKNNPIYTDKISQIPAVKAFEISNYATVYAGPGHTGGGVVGLTISYQLKIRLAPASTNKNYRVRVRYASTSNGRIRVERWSPSSVINNDFPYSSTGSRDIFGYVDTLVTTFYQSGVEIIIQNIAFGEIIIDKVELIPLDSTTLEYDGEQNLKKAQNVVNDLFTN

SEQ ID NO: 374 - protein, 658 aa, Bacillus thuringiensis S2096-2
MNSYQNTNGYEILESSSNNTNTPNRYPFANDPNIFPIILNDCPGKPWQDTWKSISNFISVMVSMAGFISSPGVLIGIPALLGIVNLLIPSSGPSVAALSICDLLSIIRKEVDESVLNDAVADFNGKLTNYKEYYLSSLQEWLSAGKPNDSRLSNVVEYFKKSEEGFNEILAGSLSRQNAQILLLPTFAQAANVQLLLLRDAVQYKKEWGALLSAEKVGSELISPTIDYGQRLKDKIAQYAKYCVFWYQEGLNQIKEEGAGTTTWLKFNKFRREMTLAVLDIIALFPIYDFEKYPLGTNVELTREIYTDPVGYSRGNYRWEGLFSFNSLEANGTRGPGLVTWLQAIDIYSHPVFTQPGYLIGWGGTRHYEDYTKGNGAFQRMSGTTSNDPHSISFGNTDIFKISSLARVELQPFVGYSIPRYRTSRAEFFPTTLNTLLYERNSSGYSQTIESVLPGIDKDLPPSARNYSHRLSNAACVQYETSVVNVFGWTHTSMTRNNPIYPDKITQIPAVKAFALENGAYVSAGPGDTGGDVVTLPYLGRLKIRLTPAPTNKNYRVRIRYATSYGASLMVQRWSPSGSESDYFGSSPTGPYPTFGYMNTLVTTFNQSGVEIIIENRHYSNIIIDKIEFLPDDLTTLESEGERNLEKTKKAVNDLFIN

SEQ ID NO: 375 - protein, 825 aa, Bacillus thuringiensis A1462
MNQNCNNNGYEVLNSGKGYCQPRYPFAQAPGSELQNMGYKEWMNMCTSGDPTVLGEGYSADVRDAVITSINIASYLLSVPFPPAGVAAGILGALLGLLWPTNTQAVWEAFMNTVEALINQKLDEYARSKAISELNGLKNVLELYQDAADDWNENPGDLRNKNRVLTEFRNVNGHFENSMPSFAVRNFEVNLLPVYAEAANLHLLLLRDAVKFGEGWGMSTDPGAERDDMYRRLRSRTEIYTDHCVNTYNQGLQQAKSLQANVSDYSRYPWTQYNQSGGFSYREAKGEYRGTENWNLYNAFRRDMTILVLDIIAQFPTYDPGLYSRPVKSELTREVYTDIRGTTWRSDANLNTIDAIENRMVGSRQLQLFTWLTEMKFYIRNTGSITSYTHGDLMVGLEKKIRKTNDNDQWLPLEGQNTSYTRIDRPGIELGKNYWYYARTQQWFETRLLQLWANTDVLSLNAGTVGNEFWVRDVPDYRNIYARSTRNHFIENHRLSWIKFEPVRDNCPFAWPGYKQLSALLFGWTHNSVDLNNIISQYRITQIPAVKAYWNRGAFSVIRGPGSTGGNLVQLGTGGEVSVKVRPEQTGSDWYRVRIRYAAGSRGRLNVKKYVSSIHASVTYDYNMTMSSSTQGTYNSFQYLDVYNFRLAEPEFEVWLTNESGGPIWIDKIEFIPLSPIPELPVYPGTYQIVTALNNSSVVTSEEFCMGIGLTTRCGVNLWSNNGNTLQKWRFVYNGDQNAFQIKSTPNEDLVLSGSNSGTSVTAETNQNRPNQYWLIEEAGNGYVYLRSKGNPNLVLDVAGTSTANGTNIILWNYNGSTNQKFKLS

SEQ ID NO: 376 - protein, 829 aa, Bacillus thuringiensis A1462
MNQSCNNNGYEVLNSGKGYCQPRYPFAQAPGSELQNMGYKEWMNMCTSGDPTVLGGGYSADVKDAVITSINIASYLLSVPFPPAGVAAGILGALLGLLWPTNTQAVWEAFMNTVEALINQKLDEYARSKAISELNGLKNVLELYQDAADDWNENPGDLRNKNRVLTEFRNVNGHFENSMPSFAVRNFEVNLLPVYAEAANLHLLLLRDAVKFGEGWGMSTDPGAERDDMYRRLRSRTEIYTDHCVNTYNQGLQQAKSLQANVSDYSRYPWTQYNQSGGFSYREAKGEYRGTENWNLYNAFRRDMTILVLDIIAQFPTYDPGLYSRPVKSELTREVYTDIRGTTWRSDANLNTIDAIENRMVGSRQLQLFTWLTEMKFYIRNTGSITSYTHGDLMVGLEKKIRKTNDNDQWLPLEGQNTSYTRIDRPGIELGKNYWYYARTQQWFETRLLQLWVNTDVLSLNAGTVGNEFWARDVPDYRNIYARSTRNHFIENHRLSWIKFEPVRDNCPFAWPGYKQLSALLFGWTHNSVDPFNTIASDRITQIPAVKGYLVDNGATVVRGPGNTGGDLVRLPAYNQQWTQLRVKVRPSTTARTRGYNVRIRYASEGNANLFVGKYVDTANRFYETGNYAVNQTFSGSMTYNSFKYLDAIGFAANEEEFRIELRCNSGGPIYIDKIEFIPVNPIPEPPEGIYQIVTALNNSSVVTSEEFCMGIGLTTRCGVNLWSNNGNTLQKWRFVYNGDQNAFQIKSTPNEDLVLSGSNSGTSVTAETNQNRPNQHWLIEEAGNGYVYLRSKGNPNLVLDVAGTSTANGTNIILWNYNGSTNQKFKLS

SEQ ID NO: 377 - protein, 864 aa, Bacillus thuringiensis serovar andalousiensis BGSC 4AW1
MPLFVVYKSEHTCYSTCEVKKGGLYMNPYFKNNAYEILDDGNMNYHPKYPLTQPLGSELQNIHYKDWLATFPERNDSILGENSSLRDGIITSTNIIAYLLSVPFPAAGAAAGILGALLGFLWPTNTQAVWEAFMEAVEALIDQKISDFAREQAIARLEGINKAIELYQNALSNLEKNPNNAVLREHVREQFIATNTYIVGSMPLFRVKGYEVPMLTMFTEAANLHLLILRDAAKFGASWDMDVSTIESYQQYLEKETVNYTDYCVGTYNVGLEEAKTLFADLCDLNTYPWTRYNQGWREEEKPNCSLQQINRYEQQLNEQINSYRAAFRYSPGEYQKLENWNLYNAFRRNMTIMVLDLVSLWPTYNPKQYVLPVKAELTREIYTDIRGTTYQSDESQNTLPVIEGRMIPPPRLFQWLRSFTFHLQNVHSDWTAGQIATGLQQTVQTTLGPSQVLPLTGVQGTSTTSFIPYIDGITRIDTQQWFEPRRFKFWSGGYIEKNFGSIEEKSPFWAEGPKWRVYEPSARANEILEHRLSWMTYEPVRSNAPFVYPQYKQLGALALGWTHQSVDPENRVVSDKITQIPAVKAYWNRGAFSVVKGSGSTGGDLVQLSPSGEVSIMVKPSRSGIGQFRVRIRYAATANGRLNIKKYVGSIHASQSYDYKQTTTSNLTFSAFQYLDVYNFNLAETQFEVWLTNESGGPIFIDKIEFIPTTPTPEPEPQNPPVPEGRYQMVTALNNSSIVDLNLSQRYVQIYGNGNAENQKWRFVYDASKDAYQIINVAAGQELVLSWFQYPEEPDAVIGEPNNKLNRQYWIFEDAGNGYTYVRNMADLNRVLDVPNGNTGNGTPIYASYFSGGTNQKFKLNKL

SEQ ID NO: 378 - protein, 810 aa, Bacillus thuringiensis A1462
MNQNYNNNGLEILDSGGVCSPRYPLANAPGSELQNMGYKEWLEMCSIKGAETFADKSTLSAQSQEGLRTAITIALSLLSNLPGPFGYPAKLLSIIFPFLWPTNTQAQWEAFMKVVEELVDQKIETFARDQAIQRLRGIQDVISLYQRDAKNFNDYPTSEPIQRQLLSQFTATNTFIVGSMSLFRVGRHEVPLLTTFVQAANLHLLLLRDAIMFGESWGMCPVTVAGYQNDFNNRIADYTDYSVSIYNQGLQKAKTLKANLRDYEKYPWARYYNSSVGPEFAYGDMENWNLYNNYRRDMTLMVLDLVALWPTYNPQQYPIAPKIQLTREIYTELRGNAGNTKRPSMDAIDAELIPPPRLFTWLESVDMHRWPTSAGYYYYTFQNAGIKHRYKYTLDSQTLTSSLRGASGNNFNLVPAEETINRVQNQHGEGLYTFSFYRSGQSDPFLNIGTTADKPYVSTMNRIPVEGDQTQANHRLSWITGMVIPELSIPAFGHYNPTYISCAAEGWTHLSVERSNEIKSDKITQIPAVKAFQLSNNASVVRGPGSTGGDLVQFSATSSGNKQLWIKVKPTTIALGRRFKVRIRYAAAANVTFTVQKCVTGVACWETATKSVTTTYSGTLTYNAFKYVDIFEIPANESEFSLEFLSTSGGPIYIDKIEFIPVNPIPEPPVPEGIYQIVTALNNSSVVDMDPGTWGTRHNVHLWQNNNTNNQKWRFVYNSSQGAYQIRNLADENLVLTREGANVKVVSYQNNNTAQYWIIEDAGNEYVYLKSKADPSRVLDVTGSSTQNGTNIQVWSNYGTLNQKFKLVKL

SEQ ID NO: 379 - protein, 1344 aa, Paenibacillus lentimorbus semadara
MNQYHNQNDNKSYNQSGNEMQIIQPSSNSLLYSPNKYPYATDPNVIAEGRSYKNWLDMCVGEGDGTRSLEAIAVAVGVRISHTIFRLLGVPYSAQGEQLFSFLLDTLWLEGNTQWEELMRHAEELINEQVPDYVRTKALAELTDLGNNLNLYIAAFEDWKRNPSSQEVRTRVIDRFNILDGLFEAYLPSFAVPGYEVPLLSVYANVVNIHLLVLRDSSIYGLDWGLSSTSVDNNYNRQQRNSATYANHCTTWYQTGLQRLQGSDASSWVNYNRFRREITLIVLDICALFSNYDVRSYPIQLRGELTRGIYTDPAVYSGTGSYSWLSQAPSFAEIENIAIREPSNFTWASYARVTTGTLEYLSSKNDFWKSHYMNYTETNSGILIQGPTYGMTTGTNIRIESVSMQEIYSVRLEAVAHAGAGGPFLGISTSEFFWSLGVRRYQNSRSPQFASQIITRQLPGVNSAVPSALDHSHELSYITAFPVRSVGTILVHEWTSTTVSRNNRIEPDKITQIPAVKSHTLSNCQVVSGTGFTGGNWLRPSDNGSFRLTITSFSSQSYRIRIHYASATFFYLDIRTGDTSNTFAVTPTTLSSGSQTVPYESFGFINIPYTFTTAPTESRYTFDFMFYSIGSANVLIDRIEIVPIGVPLFEYETKQQLEKARKAVNHLFTDGSKKALKEDTTDYEIDQAANVVDCISDECGHDKMILLDEVKYAKQLSQARNLLLNGNFDDLYSALEKENPWKTSPNVTIRQDNPIFKGHYLSMAGANDIEATNDTFPTYVYQKIDEAKLKPYTRYKVRGFVGSSKALELLVTRYNEEVDAILDVPDNIPHAPTPVCGEFDRCKPYSYPPLLPECNPEFINQMQPSSCHHNQMVDYNNMNTSTSTTMNPSMNPPLTPEIASSQSGFGRKHRKCHQAHQFEFHIDTGTIDLVEDLGIWVIFKICATDGYASLDDLEVIEEGALGVEALELVKKREKKWRHQKEQHCSQTKHKYDAAKHAVMALFTNKRYEKLKFETTISDILYADHLVQSIPYVYNKYVPEVPGMNYELYSELNTLVQNAFYLYDQRNLIKNGRFSNGLMHWQATPHARVEQEYEKSVLVLPNWDANVSQDLCIEHNRGYVLRVTARKEDPGAGNVTFSDCENHVDKLSFTSCDIATNAVPGAQANDPAAGVAYGQQGCQIDRVPYGQSGYRADGVAYEQSGHRTDGVPYRQSGYGTDGVTYEQSGHRADGVPYGQSGYRADGVAYEQSGHRADGVPYGQSGYGTDGVTYDQSANQTRKYHGCHTDGLPHPEHGCCYPDRVSDGQQLAYVTKSIDLFPDTDKVRIDIGETEGNFRVESVELICMEK

SEQ ID NO: 380 - protein, 1340 aa, Paenibacillus popilliae popilliae
MNQYQHQNDNKSYNQHGNEMQIIQPSSNSLLYSPNKYPYATDPNVIAEGRSYNNWLDTCVGVGDGTRSPETDAVAVGVRISHTIFRLLGVPYSAQGEQLFSFLLDTLWLEGNTQWEELMRHAEELINEQIPDYVRTKALAELTDLGNNLNLYIAAFEDWKRNPSSQEVRTRVIDRFNILDGLFEAYLPSFAVPGYEVPLLSVYANVANIHLLVLRDSSIHGLDWGLSSTSVDNNYNRQQRNSATYAIHCTTWYQTGLQRLQGSDASSWVNYNRFRREITLIVLDICALFSNYDVRSYPIQLRGELTRGIYTDPAVFSGTGSYSWLSQAPSFAEIENIAIREPSNFTWANYARVTTGTLEYLSSKNDFWKSHYMNYTETNSGILIQGPTYGMTTGTNIRIESVSMQEIYSVRLEAVAHAGAGGPFLGISTSEFFWSLGVRRYQNSRSPQFASQIITRQLPGVNSAVPSALDHSHELSYITAFPARSVGTILVHEWTSTTVSRNNRIEPDKITQIPAVKSHTLSNCQVVSGTGFTGGNWLRPSDNGSFRLTITSFSSQSYRIRIRYASATFFYLDIRTGDTSNTFAVTPTTLSSGSQTVPYESFGFINIPYTFTTAPTESRYTFDFMFYSIGSANVLIDRIEFVPIEGSLFEYETKQQLEKARKAVNHLFTDGSKKALKEDTTDYEIDQAANVVDCISDECGHEKMILLDEVKYAKQLSQARNLLLNGNFDDLYPALERENPWKTSPNVTIRRDNPIFKGHYLSMAGANDIEATNDTFPTYVYQKIDEAKLKPYTRYKVRGFVGSSKALELLVTRYNEEVDAILDVPDNIPHAPIPVCGEFDRCKPYSYPPLLPECNPEFINQMQPSSCHHTQMVDYNNMNMSTSTTMNPTLTPEIASSQSGFGRKHRKCHQAHQFEFHIDTGTIDLVEDLGLWVIFKICATDGYASLDDLEVIEEGALGVEALELVKKREKKWRHQKEQHCSQTKHKYDAAKHAVMALFTNTRYEKLKFETTISNILYADHLVQSIPYVYNKYVPEVPGMNYELYSELNTLVQNAFYLYDQRNLIKNGRFSNGLMYWQAAPHARVEQEFEKSVLVLPNWDANVSQDLCIEHNRGYVLRVTARKEDPGAGNVTFSDCENHVDKLSFTSCDIATNAVPGAQANDPAAGVAYGQQGCQIDRVPYGQSGYRADGVAYEQSGHRTDGVPYRQSGYGTDGVTYEQSGHRADGMPYGQSGYRADGVAYEQSGHRADGVPYGQSGYGTDGVTYDQSANQTRKYHGCHTDGLPHPEHGCCYPDRVSDGQQLAYVTKSIDLFPDTDKVRIDIGETEGNFRVESVELICMEK

SEQ ID NO: 381 - protein, 1332 aa, Paenibacillus lentimorbus semadara
MQIIQPSSNALLYSPNKYPYATDPNVIAEGRSYNNWLDTCVGVGDGTRSPEAYAIAEEAVGLSIDILAEIIYYLGFPIASPLTRALSAIAGQLFSSGDTLMQHIEQLINQKIAEYARNKALAEFQGLGRQYGLYLEALEDWEQNRLSQPHKERVRQTFRILDNSFTSSIPSFAVRNYEVPLLSVYADAANLHLLILRDSYIYGAFWGFDEDEYYRNYARQIRLSAEYANHCTTWYQTGLRRLQGTRATDWINYNRFRREMTLTVLDICALFSSYDIPSYPMGTKIQLTREIYTDPVVHSDWLQSTSPGLISFSSLENLVVRAPHLFTWLSRVTIDTGILSTVIGGQYSNNNFWRTHYQTLRTTGGTSFQSPTYGSTAFPIQRTNTLTFSGDVYTIESSVVTRSSLYGANSVAFTGTTGRSLYENPTVYPFAQKLIHELPGVDSGRPNATNYSHRLSYISGFSLGYSPSGTGLVYGWTSTTATRENNITLDDRIVQLPAVKGASLNNCQVVKGTGFTGGDWLKPNNNGTFSMYFAFRSAYTYHFRIRYASSASFSFVISEEYGRFPTTTVPLLSTMSPLPQNTPFEAFKTVDLPSTVTIRYTSAASTTFQLNFRFTVPGSANVLIDRIEFVPIEGSLFEYETKQQLEKARKAVNHLFTDGSKKALKEDTTDYEIDQAANVVDCISDECGHEKMILLDEVKYAKQLSQARNLLLNGNFDDLYPALERENPWKTSPNVTIRQDNPIFKGHYLSMAGANDIEATNDTFPTYVYQKIDEAKLKPYTRYKVRGFVGSSKDLELLVTRYNEEVDAILDVPDNIPHAPTPVCGEFDRCKPYSYPPLLPECNPEFINQMQPSSCHHNQMVDYNNMNTSTSTTMNPSMNPPLTPEIASSQSGFGRKHRKCHQAHQFEFHIDTGTIDLVEDLGIWVIFKICATDGYASLDDLEVIEEGALGVEALELVKKREKKWRHQKEQHCSQTKHKYDAAKHAVMALFTNTRYEKLKFETTISDILYADHLVQSIPYVYNKYVPEVSGMNYELYTELNTLVQNAFYLYDQRNLIKNGRFSNGLMYWQATPHARVEQEYDRSVLVLPNWDANVSQQLCIEHNRGYVLRVTARKEDPGAGNVTFSDCANHVDKLSFTSCDIATNAVPGAQANDPAAGVAYGQQGCQIDRVPYGPSGYRADGVAYEQSGHRTDGVPYRQSGYRADGVAHDQPGYRADGVAYEQSGYRADGVAYEQSGHRADGVPYGQSGYGTDGVTYDQSAKQTRKYHGCHTDGLPHPEHGCCYPDRVSDGQQLAYVTKSIDLFPDTDKVRIDIGETEGNFRVESVELICMEK

SEQ ID NO: 382 - protein, 405 aa, Paenibacillus lentimorbus semadara
MNQYHNQNDNKSYNQSGNEMQIIQPSSNALLYSPNKYPYATDPNVIAEGRSYKNWLDMCTGTGDTRSPEAAAISKGAVSAAITISTGLLGLLGVPFASQIGAFYTFLLNTLWPASNTQWEQFIAHVEELINAKLTDHVRNSALTKLNGLRNNIEIYNEALIVWKQDPNNSKLKDDVRSKFVGLNSQFEEYIPQFKEEGFEVQLLTIYAQSANLHLLLLRDSSLYGASWGFAQATIDNNYNRQIRKTAEYANHCTTWYQTGLQRLQGTTASSWLSYHRFRREMTLTVLDICALFSNYDARSYPLEVRGELTREIYTDPVAPGTNWIDRAPSFAEIENLVIRAPRTVTWISGDLIVYTGRLYGYTGNNDYWAAHRLDFLETNGYRFEGPTYGSTINISRTDSIPMNS

SEQ ID NO: 383 - protein, 686 aa, Bacillus thuringiensis entomocidus INA288
MNSYQNKNEYEILNAPSNNTNMPNRYPFANDPNAMMKNGNYKDWLDICNPEYRYSNPEAYRNTKAAMSFGVGLVSTILGVLGGPISVTLGAIIGVVTAVLEFIPADEYDNTKETWGVLIAAIKELIYEEIKGEAMNAAKAKLDGLYKVMKNYDNKLNVWKNGDKSPVEQNEIQRVFADTNNSFLLLISQFQQLGHEVSFLPLFAVAANFHLLLLRDVSIYGKEWGYTNNIIEGYHSDQLDMTQDYTNYAVDTYNKGLEEAKKIKNSDKLDWDFYNQYRRDMTLTVLDVIALFPTYDVRKYPISTKVELTREIYTDMINYINNPFMTNPVEGQRFAGYTVAQFNSIENALTREPHLFTWLKEVTGYFYAQYGQQSFMTGIQNTSYRTNYEDYPFSGPLHGVRYAGDTARSVDNNGKDVYSIYSTMFPLETNNHVHELRPGTAYYFGVKGHRHDATDRRTGNSSQKILGEDSKTGRIATGPSYFISEIPYYDKETNETIRPTPEKYNHRLSYISAYATDCGRISGVRGDGCFRTPQMCAWTHVSADPYNTIHPDKITQISAVKAFYIWDTGEGQVVSGPGFTGGDLVKLPYNARLKIRLKPTSTSKKYRVRVRYASMGAGTLRAEKWSPYGSVFSNFAYEYTGDSNKFNNFKYLETLSESFNISGVEIIIQNLSSSQLIVDKLEFIPI

SEQ ID NO: 384 - protein, 275 aa, Bacillus thuringiensis 89-T-34-22
MAIINLANELAIWAKRWCAARGYTYLVSGLQAHTGNYGRIYNYNMSVPDPIVTDNPTNAAMARGTTPNPTSQPIIRTISFNETLTDSQSTATEHGITAGAEVTVKSEAGLIFAKVGFEVKVSFQYNYTTTNTYTTETSRSWTDSLQITVPPGYVTEHTFIVQTGPYSKNVVLEADIAGHGWFNYSAPGYTGTGIVNITQVLYDNKVPGVTPYPDNFYARFRGSGKLEGKMGLQSFVNLVERPLLGRAGQVREYQIPVSLPSGLDIPIFDPVVSLQ

SEQ ID NO: 385 - protein, 338 aa, Bacillus thuringiensis dakota
MYNDKRMCSDPYQGMNKPHYCNCHTYNNSEITGGLQVDLDNQVVETFQSTTDVIREYLMFNELSALSSSPESVRSRFSSIYGTNPDGIALNNETYFNAVKPPITAQYGYYCYKNVGTVQYVNRPTDINPNVILAQDTLTNNTNEPFTTTITITGSFTNTSTVTSSTTTGFKFTSKLSIKKVFEIGGEVSFSTTIGTSETTTETITVSKSVTVTVPAQSRRTIQLTAKIAKESADFSAPITVDGYFGANFPKRVGPGGHYFWFNPARDVLNTTSGTLRGTVTNVSSFDFQTIVQPARSLLDEQQETLEYAIPGDPSGEQLQQMEQRMFFSKCQCPKWGN

SEQ ID NO: 386 - protein, 338 aa, Bacillus thuringiensis A1470
MYNDKRMCSDPYQGMNKPHYCNCHTYNNSEITGGLQVDLDNQVAETFQSTTDVIREYLMFNELSALSSSPESVRSRFFSIYGTNPDGIALNNETYFNAVKPPITAQYGYYCYKNVGTVQYVNRPTDINPNVILAQDTLTNNTNEPFTTTITITGSFTNTSTVTSSTTTGFKFTSKLSIKKVFEIGGEVSFSTTIGTSETTTETITVSKSVTVTVPAQSRRTIQLTAKIAKESADFSAPITVDGYFGANFPKRVGPGGHYYWFNPARDVLNTTSGTLRGTVTNVSSFDFQTIVQPARSLLDEQQETLEYAIPGDPSGEQLQQMEQRMFFSQCQCPKWGN

SEQ ID NO: 387 - protein, 304 aa, Bacillus thuringiensis
MYYTTQVTGGFQADLNNQVVETFQPSTNVIQEYLTFNDLPALGSSPQSVRSRFSSIYGTNPDGIALNNETYFSAVQPPITVQYGHYCYKNVGTVQYVNRPTDINPNVILAQDTLTNNTNEPFTTTITLTGSWTKSSTVTSSTTTGLKITTKLSIKKVFEIGGEVSFSTTIGSSEATSETFTVSKAVTVTVPAQSRRNIQLTAKIARESADFSAPITVDGYFGANFPRRVGPGGHYFWFNPARDVLNATSGTLRGTVTNVSSFDFQTVVQPAYSLLAEQQEALESAISGDPSEEQLKQIQQTIGL

SEQ ID NO: 388 - protein, 1134 aa, Bacillus thuringiensis CAA890
MNSNDSQNHDKLEICSNASLLSTPPYKTEYYEGEVLMDTIPFSSGKSAAQMGTSIVGQILGVLGVPFALQVTNLYSSLLDTLWPDGKSQWEIFMEQVEEIVDQKIENYARNKALAELEGLGNNFEVYLEALENWQSNTRDINDVKIRFISLDSLFTQSMPSFRIEGFQLPLLSVYAQAANLHLLLLRDATTFGKEWGLDSATMDSYYKRQKALSAEYSDHCVKWYKNGLNKLSKSTAKDWVKFNQFRREMTLTVLDVVALFPNYDAKIYPMQTVTQLTREVYTDPVGMTNLPNGIGSWYDIAPTFATIENAVIRKPHLFDFIRNLYVYFGDRGASANRSMKFWNGHEIFYANIGSSVFFQVYNYVKLGSNNYPYVFVDRDIYQTESLAGCIYDIIYPGYTYKFFGAPKVEFHVVDRRNNTGIFTFNPGFGQIIQNVQNSLSQLPLESLDEPAYEAYSHRLCHVTLVPPGNNSNYEGLPVYSWTHKSASLENVIYPDKITQIPAVKSFPGGQWGGVEAGPGFTGGDVTKSVTSEATTILRDVVKLAVTIPQDSIKQKYRVRIRYASQTDIPATFFTSDSGNRDFVLKSTTTAASNAFENYKEFQYIDIPGTIEFTKVNEIVTVYLHAYKVSNHHVNIDKVEFIPVDNNFEARKQLETSEFFAKKLLDTTKESLDREVTDYQIDYTAKLVECVSDELYPMEKQELLNIVTTAKKLSQDRNLLQDIDFSAINRENGWIGSRGIEGTEGNINFKSRSVRLPGARNIDGKIDSTYFYQKINASKLKPYTRYELRGRIESSKKLEIYLIHHNANRIIKNVNGNNSLLNSYNEIDPCISKCSNHILSIEEAELDMNNHTNFHEFSLCIDTGELDLNKNIGIWVAFKISDLNGYAELRNIECIEVEPLFGEALEKLKKQEQEWTRTENKQYEESKKIRAVAIKAVEQLFEDSSYQKLRPELDLSNISKAENLVNSIPYVSNDWFSYVPGINHNTVEELKTKIQLAFALYRHRNSIQNGDFKNGLNSWTVTSDVVVEENQIDPELVISNWSSQVSQDVVVEANHRYLLRVTAKKENVGIGYITIHDSTDNSKSIVFDDCEKNQDHYVTKTTEFIPSTDKVYIKIHETDGIFRIKNIDFTLNKK

SEQ ID NO: 389 - protein, 1177 aa, Lysinibacillus sphaericus IAB59
MDINNNNEKEIINSHLLPYSLLKKYPIKSLQSTNYKDWLNLCQDFNKDIESYDLVTAVSSGTIVVGTMLSAIYAPALIAGPIGIIGAIIISFGTLLPLLWNESENNPKTTWIEFIRMGEQLVDKTISQTVFNILESYLKDLKVNLVDYEKAKQDWIELKKQQLPGSPPSTKLRNAADIAHQRLDSLHNKFAELNKFKVEPYETILLPVYAQAANLHLNLLQQGAMFADQWIEDKYSSRNDTFAGNSNDYQNLLKSRTITYINHIENTYQNGLNYLWNQPEMTWDIYNEYRTKMTITALDLMALFPFYNKELYDPTVGIKSELTREIFINTPVEPHLHRYFKLSETEEKLTNNSDLFKWLTSLKFRTLYQPGFPFLIGNMNSFTNTNGTQLINNQQQLWSFPGTTENEEKLFPSPANIDQVTMYIYYGSGWGIPEPISTTINKLIFNHDKHELISEYDAGNTNAPTRSLSLGLPNHYLSCLNSYYPLTATTDGMNKEELKMYSFGWTHNSVDFLNEISKDKITQIPAVKAYRLTSNSRVIKGPSHIGGNLVYLSENSQMALTCRYTNSSPQEYKIRIRYASNRLNMGQLFTTFSSHQFVLPPTFNHFNIEQAKYEDYAYAEFPESMSIRGNLNSDILLILNILAGGELLLDKIEFIPLTQKVKDNLEKEKIDMLKNLTDSLFNSPSKDTLKIDSTDYQIDQIAFQIESINEEINPQEKMELLDNIKYAKKLNQLRNLLYSRESQAQIDWVTSNDVSIYHGKKPFNDYTLVMSRTSSSLSEITATNYQTYIYKKIEESKLKPYTRYLVRGFISNSEDLEIFISRYENEIHTNMNVHGDDDTLLNSDIRQNECESKLPIIFDATSQYSLSPSRTSGISNHSYYNNGHQSSCNDTHIFSFSIDTGEVDFNNYPGIEILFKLSNTNGYASISNLEVIEERLLTEEEKRQIIQIENRWKAKKESQRNETEKITTQAQQAINSLFTDTQYSNLKFETTKQNITEANTILENIPYVYNALLPTEPGMNFVLFNSFKDQINKAHALYKMRNLIKNGDFINDTKYWSISTDVKLEKVNKETILVLSSWEAQASQQILVQKQKRYLLRVIAKKEDMGRGNVIISDCLNNIAKIDFTPHDCNMNHIQNSSEFIIKTIHFSPNTEQVRIDIGQSDGVFKVESIELICVNY

SEQ ID NO: 390 - protein, 1177 aa, Lysinibacillus sphaericus 47-6B; identical to SEQ ID NO: 389

SEQ ID NO: 391 - protein, 1177 aa, Lysinibacillus sphaericus NHA15b; identical to SEQ ID NO: 389

SEQ ID NO: 392 - protein, 1129 aa, Lysinibacillus sphaericus LP1G
MDINNNNEKEIINSHLLPASLLKKHPIKSLQSTNYKDWLNLCQDFNKDIESYDLVTAVSSGTIVVGTMLSAIYAPAIIAGPIGVIGAIIISFGTLLPLLWSEDENNPKTVWIEFIRMGERLVDKTISQTVLNILESYLKDLKVNLIDYEKAKQDWIELKKQQLPGSPPSINLRNAADIAHQRLDSLHNKFAELNVFKVASYETILLPVYAQAANLHLNLLQQGAMFADQWIEDKYSPRNDTFAGNSNDYQDLLKSRTITYINHIENTYKDGLNYLWNQPEMTWDIYNEYRTNMTLTALDLLPLFPFYNKELYDPRVGIKSELTREVYINTPVDPHLHRYFKLGETEDKLTNNSELFKWLTSLKFRTFNQPGFPFLIGNMNYFKKTNGTQLINNQQQLWSFPGTTEIEKLFPSPANIDKVTMYIYYGSGWEVPEPISITINKLIFNHHKHGLITEYDAGNTNAPTMGIYVNLPKHYLSCLNSYYPLTATTNGMGKEELKMYSFGWTHESVDFLNEISNDKITQIPAVKAYNLNSNSRVIKGPGHIGGNLVYLSDKSQLSLACRYTNSSPQDFLIRIRYASNKRNMVQLFTPFSTHQFVLPQTFNHLNIEQTKYEDYEYAQLPGSLTINGNVNIDLLFLLNVLDGGELLLDKIEFIPLTQKVKDNLEKEKIDMLKNLTDSLFNSPAKDTLKINSTDYQIDQIAFQIESINEEINTQEKMKLLDNIKYAKKLNQLRNLLYSRESQAQIDWVTSNDVSIYHGKKPFNEYTLVMSGSSLSKITSSNYPTYIYKKIEESKLKPYTRYLVRGFISNSDNLEIFISRYENEIHTNMNVHVDDDTLLNSYKRQNECESKLPIVFDETSQYPLSPSRTSGISNHSYYNGAQQSSCHDTQIFSFSIDTGDVDFNEYPGIEILFKLSNSNGYASISNLEVIEERLLTEEEKRHIIEIENRWKAKKEIQRNETEKETTQAQQAINNLFTDTQYSKLKFETTKQSISKANAILENIPYVYNSLLPTEPGMNFELFNSFKDQINKAHTLYKMRNSIKNGDFINGTEYWSISTDVKLEKTNIETILVMSSWSAQSSQQILVQKQNRYLLRVIAKKEDMGSGNVTISDCLNNIAKIEFIPHDCNMN

SEQ ID NO: 393 - protein, 1129 aa, Lysinibacillus sphaericus 2173
MDINNNNEKEIINSHLLPASLLKKHPIKSLQSTNYKDWLNLCQDFNKDIESYDLVTAVSSGTIVVGTMLSAIYAPAIIAGPIGVIGAIIISFGTLLPLLWSEDENNPKTVWIEFIRMGERLVDKTISQTVLNILESYLKDLKVNLIDYEKAKQDWIELKKQQLPGSPPSINLRNAADIAHQRLDSLHNKFAELNVFKVASYETILLPVYAQAANLHLNLLQQGAMFADQWIEDKYSPRNDTFAGNSNDYQDLLKSRTITYINHIENTYKDGLNYLWNQPEMTWDIYNEYRTNMTLTALDLLPLFPFYNKELYDPRVGIKSELTREVYINTPVDPHLHRYFKLGETEDKLTNNSELFKWLTSLKFRTFNQPGFPFLIGNMNYFKKTNGTQLINNQQQLWSFPGTTEIEKLFPSPANIDKVTMYIYYGSGWEVPEPISITINKLIFNHHKHGLITEYDAGNTNAPTMGIYVNLPKHYLSCLNSYYPLTATTNGMGKEELKMYSFGWTHESVDFLNEISNDKITQIPAVKAYNLNSNSRVIKGPGHIGGNLVYLSDKSQLSLACRYTNSSPQDFLIRIRYASNKRNMVQLFTPFSTHQFVLPQTFNHLNIEQTKYEDYEYAQLPGSLTINGNVNIDLLFLLNVLDGGELLLDKIEFIPLTQKVKDNLEKEKIDMLKNLTDSLFNSPAKDTLKIDSTDYQIDQIAFQIESINEEINTQEKMKLLDNIKYAKKLNQLRNLLYSRESQAQIDWVTSNDVSIYHGKKPFNEYTLVMSGSSLSKITSSNYPTYIYKKIEESKLKPYTRYLVRGFISNSDNLEIFISRYENEIHTNMNVHVDDDTLLNSYKRQNECESKLPIVFDETSQFPLSPSRTSGISNHSYYNGAQQSSCHDTQIFSFSIDTGDVDFNEYPGIEILFKLSNSNGYASISNLEVIEERLLTEEEKRHIIEIENRWKAKKEIQRNETEKETTQAQQAINNLFTDTQYSKLKFETTKQSISKANAILENIPYVYNSLLPTEPGMNFELFNSFKDQINKAHTLYKMRNSIKNGDFINGTKYWSISTDVKLEKTNIETILVMSSWSAQSSQQILVQKQNRYLLRVIAKKEDMGSGNVTISDCLNNIAKIEFIPHDCNMN

SEQ ID NO: 394 - protein, 464 aa, Lysinibacillus sphaericus IAB59
MENQIKEEFNKNNHGIPSDCSCIKEGDDYNSLTEINAKEFSYCSPNMFNLNLPEQSTRFQTIASIHSNNCSFEILNNDPGYIYGDSVDGECRIAVAHRELGNGLERTGDDRFLFIFYALDNNNFIIANRHDGFVLQFLIANGQGVIVSREYQPNIHQEFTIQSINSDTFRLHSRDTNTFATVCWAQFNSWTKIVSRVDNPGAPNANLKHRSLLTDINMPQLPSLTPLQPLPRLTELEDGGLSPAQAPRAIIGRTLIPCLFVNDPVLRLENRIKQSPYYVLEHRQYWHRIWTDIFTAGERREYREVTGINNNAQNDMNKMINITIGADGPNRLRFGNLSTPFRQQIIDNSNTLGSFANTNYGTRTDIVNVFNSEFHQVRYARFVKAYEYRLTRADGSQVGTPWVVLDRKEMDLRTYPHNMAITLENVKIDNADNSYDLSIWKTPLKLKDGKIIIENHENSKPYYN

SEQ ID NO: 395 - protein, 464 aa, Lysinibacillus sphaericus 47-6B; identical to SEQ ID NO: 394

SEQ ID NO: 396 - protein, 464 aa, Lysinibacillus sphaericus NHA15b; identical to SEQ ID NO: 394

SEQ ID NO: 397 - protein, 464 aa, Lysinibacillus sphaericus 2173; identical to SEQ ID NO: 394

SEQ ID NO: 398 - protein, 467 aa, Lysinibacillus sphaericus LP1G
MENQIKEEFNKNNHGIPSDCSCIKEGDDYNSLTEVPSEINAKEFSYCSPNMFNLNLPEQSTRFQTIGSIHSNNCSFEILNNDPGYIYGDSVAGECRIAVAHRELGNGLERTGDDRFLFIFYALDNNNFIIANRHDGFVLQFLIANGQGVIVSREYQPNIRQEFTIQSINSDTFRLHSRDTNTFATVCWAQFNSWTKIVSRVDNPGAPNADLRHRSFLDINMPQLPSLTPLQPLPRLTGLEDGGLSPAQAPRAIIGRTLIPCLFVNDPVLRLESRIKQSPYYVLEHRQYWHRLWTDIFNAGERREYREVTGINHNAQNDMNNMINITIGSDGPNRLLFGHLSTPFRQQIISNSNTLGSFANSNYSSRTESITYLNTEFHQVRFARFVKAYEYRLTRADGTLVGTPWVVLDRKEMDLRTFPHNMTLNLENVKIVNADNSYDLSVWKTPLKLKDGKIIIENHENSKPYYN

SEQ ID NO: 399 - protein, 1180 aa, Bacillus thuringiensis israelensis
MNPYQNKNEYETLNASQKKLNISNNYTRYPIENSPKQLLQSTNYKDWLNMCQQNQQYGGDFETFIDSGELSAYTIVVGTVLTGFGFTTPLGLALIGFGTLIPVLFPAQDQSNTWSDFITQTKNIIKKEIASTYISNANKILNRSFNVISTYHNHLKTWENNPNPQNTQDVRTQIQLVHYHFQNVIPELVNSCPPNPSDCDYYNILVLSSYAQAANLHLTVLNQAVKFEAYLKNNRQFDYLEPLPTAIDYYPVLTKAIEDYTNYCVTTYKKGLNLIKTTPDSNLDGNINWNTYNTYRTKMTTAVLDVVALFPNYDVGKYPIGVQSELTREIYQVLNFEESPYKYYDFQYQEDSLTRRPHLFTWLDSLNFYEKAQTTPNNFFTSHYNMFHYTLDNISQKSSVFGNHNVTDKLKSLGLATNIYIFLLNVISLDNKYLNDYNNISKMDFFITNGTRLLEKELTAGSGQITYDVNKNIFGLPILKRRENQGNPTLFPTYDNYSHILSFIKSLSIPATYKTQVYTFAWTHSSVDPKNTIYTHLTTQIPAVKANSLGTASKVVQGPGHTGGDLIDFKDHFKITCQHSNFQQSYFIRIRYASNGSANTRAVINLSIPGVAELGMALNPTFSGTDYTNLKYKDFQYLEFSNEVKFAPNQNISLVFNRSDVYTNTTVLIDKIEFLPITRSIREDREKQKLETVQQIINTFYANPIKNTLQSELTDYDIDQAANLVECISEELYPKEKMLLLDEVKNAKQLSQSRNVLQNGDFESATLGWTTSDNITIQEDDPIFKGHYLHMSGARDIDGTIFPTYIFQKIDESKLKPYTRYLVRGFVGSSKDVELVVSRYGEEIDAIMNVPADLNYLYPSTFDCEGSNRCETSAVPANIGNTSDMLYSCQYDTGKKHVVCQDSHQFSFTIDTGALDTNENIGVWVMFKISSPDGYASLDNLEVIEEGPIDGEALSRVKHMEKKWNDQMEAKRSETQQAYDVAKQAIDALFTNVQDEALQFDTTLAQIQYAEYLVQSIPYVYNDWLSDVPGMNYDIYVELDARVAQARYLYDIRNIIKNGDFTQGVMGWHVTGNADVQQIDGVSVLVLSNWSAGVSQNVHLQHNHGYVLGVIAKKEGPGNGYVTLMDWEENQEKLTFTSCEEGYITKTVDVFPDTDRVRIEIGETEGSFYIESIELICMNE

SEQ ID NO: 400 - protein, 1180 aa, Bacillus thuringiensis israelensis HD522
MNPYQNKNEYETLNASQKKLNISNNYTRYPIENSPKQLLQSTNYKDWLNMCQQNQQYGGDFETFIDSGELSAYTIVVGTVLTGFGFTTPLGLALIGFGTLIPVLFPAQDQSNTWSDFITQTKNIIKKEIASTYISNANKILNRSFNVISTYHNHLKTWENNPNPQNTQDVRTQIQLVHYHFQNVIPELVNSCPPNPSDCDYYNILVLSSYAQAANLHLTVLNQAVKFEAYLKNNRQFDYLEPLPTAIDYYPVLTKAIEDYTNYCVTTYKKGLNLIKTTPDSNLDGNINWNTYNTYRTKMTTAVLDLVALFPNYDVGKYPIGVQSELTREIYQVLNFEESPYKYYDFQYQEDSLTRRPHLFTWLDSLNFYEKAQTTPNNFFTSHYNMFHYTLDNISQKSSVFGNHNVTDKLKSLGLATNIYIFLLNVISLDNKYLNDYNNISKMDFFITNGTRLLEKELTAGSGQITYDVNKNIFGLPILKRRENQGNPTLFPTYDNYSHILSFIKSLSIPATYKTQVYTFAWTHSSVDPKNTIYTHLTTQIPAVKANSLGTASKVVQGPGHTGGDLIDFKDHFKITCQHSNFQQSYFIRIRYASNGSANTRAVINLSIPGVAELGMALNPTFSGTDYTNLKYKDFQYLEFSNEVKFAPNQNISLVFNRSDVYTNTTVLIDKIEFLPITRSIREDREKQKLETVQQIINTFYANPIKNTLQSELTDYDIDQAANLVECISEELYPKEKMLLLDEVKNAKQLSQSRNVLQNGDFESATLGWTTSDNITIQEDDPIFKGHYLHMSGARDIDGTIFPTYIFQKIDESKLKPYTRYLVRGFVGSSKDVELVVSRYGEEIDAIMNVPADLNYLYPSTFDCEGSNRCETSAVPANIGNTSDMLYSCQYDTGKKHVVCQDSHQFSFTIDTGALDTNENIGVWVMFKISSPDGYASLDNLEVIEEGPIDGEALSRVKHMEKKWNDQMEAKRSETQQAYDVAKQAIDALFTNVQDEALQFDTTLAQIQYAEYLVQSIPYVYNDWLSDVPGMNYDIYVELDARVAQARYLYDTRNIIKNGDFTQGVMGWHVTGNADVQQIDGVSVLVLSNWSAGVSQNVHLQHNHGYVLRVIAKKEGPGNGYVTLMDCEENQEKLTFTSCEEGYITKTVDVFPDTDRVRIEIGETEGSFYIESIELICMNE

SEQ ID NO: 401 - protein, 1180 aa, Bacillus thuringiensis israelensis; identical to SEQ ID NO: 400

SEQ ID NO: 402 - protein, 1180 aa, Bacillus thuringiensis s. israelensis BRC-LLP29; identical to SEQ ID NO: 400

SEQ ID NO: 403 - protein, 145 aa, Bacillus thuringiensis LDC-9
SSLNFQQSYFIRIRYASNGSANTRAVINLSIPGVAELGMALNPTFSGTDYTNLKYKDFQYLEFSNEVKFAPNQNISLVFNRSDVYTNTTVLIDKIEFLPITRSIREDREKQKLETVQQIINTFYANPIKNTLQSELTDYDIDQGG

SEQ ID NO: 404 - protein, 1136 aa, Bacillus thuringiensis israelensis 4Q2-72
MNSGYPLANDLQGSMKNTNYKDWLAMCENNQQYGVNPAAINSSSVSTALKVAGAILKFVNPPAGTVLTVLSAVLPILWPTNTPTPERVWNDFMTNTGNLIDQTVTAYVRTDANAKMTVVKDYLDQYTTKFNTWKREPNNQSYRTAVITQFNLTSAKLRETAVYFSNLVGYELLLLPIYAQVANFNLLLIRDGLINAQEWSLARSAGDQLYNTMVQYTKEYIAHSITWYNKGLDVLRNKSNGQWITFNDYKREMTIQVLDILALFASYDPRRYPADKIDNTKLSKTEFTREIYTALVESPSSKSIAALEAALTRDVHLFTWLKRVDFWTNTIYQDLRFLSANKIGFSYTNSSAMQESGIYGSSGFGSNLTHQIQLNSNVYKTSITDTSSPSNRVTKMDFYKIDGTLASYNSNITPTPEGLRTTFFGFSTNENTPNQPTVNDYTHILSYIKTDVIDYNSNRVSFAWTHKIVDPNNQIYTDAITQVPAVKSNFLNATAKVIKGPGHTGGDLVALTSNGTLSGRMEIQCKTSIFNDPTRSYGLRIRYAANSPIVLNVSYVLQGVSRGTTISTESTFSRPNNIIPTDLKYEEFRYKDPFDAIVPMRLSSNQLITIAIQPLNMTSNNQVIIDRIEIIPITQSVLDETENQNLESEREVVNALFTNDAKDALNIGTTDYDIDQAANLVECISEELYPKEKMLLLDEVKNAKQLSQSRNVLQNGDFESATLGWTTSDNITIQEDDPIFKGHYLHMSGARDIDGTIFPTYIFQKIDESKLKPYTRYLVRGFVGSSKDVELVVSRYGEEIDAIMNVPADLNYLYPSTFDCEGSNRCETSAVPANIGNTSDMLYSCQYDTGKKHVVCQDSHQFSFTIDTGALDTNENIGVWVMFKISSPDGYASLDNLEVIEEGPIDGEALSRVKHMEKKWNDQMEAKRSETQQAYDVAKQAIDALFTNVQDEALQFDTTLAQIQYAEYLVQSIPYVYNDWLSDVPGMNYDIYVELDARVAQARYLYDTRNIIKNGDFTQGVMGWHVTGNADVQQIDGVSVLVLSNWSAGVSQNVHLQHNHGYVLRVIAKKEGPGNGYVTLMDCEENQEKLTFTSCEEGYITKTVDVFPDTDRVRIEIGETEGSFYIESIELICMNE

SEQ ID NO: 405 - protein, 1136 aa, Bacillus thuringiensis israelensis
MNSGYPLANDLQGSMKNTNYKDWLAMCENNQQYGVNPAAINSSSVSTALKVAGAILKFVNPPAGTVLTVLSAVLPILWPTNTPTPERVWNDFMTNTGNLIDQTVTAYVRTDANAKMTVVKDYLDQYTTKFNTWKREPNNQSYRTAVITQFNLTSAKLRETAVYFSNLVGYELLLLPIYAQVANFNLLLIRDGLINAQEWSLARSRGDQLYNTMVQYTKEYIAHSITWYNKGLDVLRNKSNGQWITFNDYKREMTIQVLDILALFASYDPRRYPADKIDNTKLSKTEFTREIYTALVESPSSKSIAALEAALTRDVHLFTWLKRVDFWTNTIYQDLRFLSANKIGFSYTNSSAMQESGIYGSSGFGSNLTHQIQLNSNVYKTSITDTSSPSNRVTKMDFYKIDGTLASYNSNITPTPEGLRTTFFGFSTNENTPNQPTVNDYTHILSYIKTDVIDYNSNRVSFAWTHKIVDPNNQIYTDAITQVPAVKSNFLNATAKVIKGPGHTGGDLVALTSNGTLSGRMEIQCKTSIFNDPTRSYGLRIRYAANSPIVLNVSYVLQGVSRGTTISTESTFSRPNNIIPTDLKYEEFRYKDPFDAIVPMRLSSNQLITIAIQPLNMTSNNQVIIDRIEIIPITQSVLDETENQNLESEREVVNALFTNDAKDALNIGTTDYDIDQAANLVECISEELYPKEKMLLLDEVKNAKQLSQSRNVLQNGDFESATLGWTTSDNITIQEDDPIFKGHYLHMSGARDIDGTIFPTYIFQKIDESKLKPYTRYLVRGFVGSSKDVELVVSRYGEEIDAIMNVPADLNYLYPSTFDCEGSNRCETSAVPANIGNTSDMLYSCQYDTGKKHVVCQDSHQFSFTIDTGALDTNENIGVWVMFKISSPDGYASLDNLEVIEEGPIDGEALSRVKHMEKKWNDQMEAKRSETQQAYDVAKQAIDALFTNVQDEALQFDTTLAQIQYAEYLVQSIPYVYNDWLSDVPGMNYDIYVELDARVAQARYLYDTRNIIKNGDFTQGVMGWHVTGNADVQQIDGVSVLVLSNWSAGVSQNVHLQHNHGYVLRVIAKKEGPGNGYVTLMDCEENQEKLTFTSCEEGYITKTVDVFPDTDRVRIEIGETEGSFYIESIELICMNE

SEQ ID NO: 406 - protein, 1135 aa, Bacillus thuringiensis israelensis
MNSGYPLANDLQGSMKNTNYKDWLAMCENNQQYGVNPAAINSSSVSTALKDAGAILKFVNPPAGSVLTVLSAVLPILWPTNTPTPERVWNDFMTNTGNLIDQTVTAYVRTDANAKMTVVKDYLDQYTTKFNTWKREPNNQSYRTAVITQFNLTSAKLRETAVYFSNLVGYELLLLPIYAQVANFNLLLIRDGPHKCTRMVYARSCDQLYNTMVQYTKEYIAHSITWYNKGLDVLRNKSNGQWITFNDYKREMTIQVLDILALFASYDPRRYPADKIDNTKLSKTEFTREIYTALVESPSSKSIAALEAALTRDVHLFTWLKRVDFWTNTIYQDLRFLSANKIGFSYTNSSAMQESGIYGSSGLVQIYLIKFNLILIVIKLLSQILAPPLIELQKWISTKFDGTLASYNSNITPTPEGLRTTFFGFSTNENTPNQPTVNDYTHILSYIKTDVIDYNSNRVSFAWTHNIVDPNNQIYTDAITQVPAVKSNFLNATARVIKGPGHTGGDLVALTSNGTLSGGRMEIQCKTSIFNDPTRSYGLRIRYAANSPIVIECDHMYYKEFLEEQRLVQNYVSRPNNIIPTDLKYEEFRYKDPNDAIVPMRLSSNQLITIAIQPLNMTSNNQVIIDRIEIIPITQSVLDETENQNLESEREVVNALFTNDAKDALNIGTTDYDIDQAANLVECISEGIISKEKMLLLDEVKNAKQLSQSRNVLQNGDFESRTLGWTTSDNITIQEDDPIFKGHYLHMSGARDIDGTIFPTYIFQKIDESKLKPYTRYLVRGFVGSSKDVELVVSRYGEEIDAIMNVPADLNYLYPSTFDCEGLIVVSVRCAANIWDTSDMLYSCQYDTGKKHVVCQDSHQFSFTIDTGALDTNENIGVWVMFKISSPDGYASLDNLEVIERGPIDGEALSRVKHMEKKWNDQMEAKRSETQQAYDVAKQAIDALFTNVQDEALQFDTTLAQIQYAEYLVQSIPYVYNDWLSDVPGMNYDIYVELDARVAQARYLYDTRNIIKNVDFTQGVMGWHVTGNADVQQIDGVSVLVLSNWSAGVSQNVHLQHNHGYVLRVIAKKEGPGNGYVTLMDCEENQEKLTFTSCEEGYITKTVDVFPDTDRVRIEIGETEGSFYIESIELICMNE

SEQ ID NO: 407 - protein, 1135 aa, Bacillus thuringiensis israelensis HD522
MNSGYPLANDLQGSMKNTNYKDWLAMCENNQQYGVNPAAINSSSVSTALKVAGAILKFVNPPAGTVLTVLSAVLPILWPTNTPTPERVWNDFMTNTGNLIDQTVTAYVRTDANAKMTVVKDYLDQYTTKFNTWKREPNNQSYRTAVITQFNLTSAKLRETAVYFSNLVGYELLLLPIYAQVANFNLLLIRDGLINAQEWSLACAGDQLYNTMVQYTKEYIAHSITWYNKGLDVLRNKSNGQWITFNDYKREMTIQVLDILALFASYDPRRLPADKIDNTKLSKTEFTREIYTALVESPSSKSIAALEAALTRDVHLFTWLKRVYFWTNTIYQDLRFLSANKIGFSYTNSSAMQESGIYGSSGFGSNLTHQIQLNSNVYKTSITDTSSPSNRVTKMDFYKIDGTLASYNSNITPTPEGLRTTFFGFSTNENTPNQPTVNDYTHILSYIKTDVIDYNSNRVSFAWTHKIVDPNNQIYTDAITQVPAVKSNFLNATAKVIKGPGHTGGDLVALTSNGTLSGRMEIQCKTSIFNDPTRSYGLRIRYAANSPIVLNVSYVLQGVSRGTTISTESTFSRPNNIIPTDLKYEEFRYKDPFDAIVPMRLSSNQLITIAIQPLNMTSNNQVIIDRIEIIPITQSVLDETENQNLESEREVVNALFTNDAKDALNIGTTDYDIDQAANLVECISEELYPKEKMLLLDEVKNAKQLSQSRNVLQNGDFESATLGWTTSDNITIQEDDPIFKGHYLHMSGARDIDGTIFPTYIFQKIDESKLKPYTRYLVRGFVGSSKDVELVVSRYGEEIDAIMNVPADLNYLYPSTFDCEGSNRCETSAVPANIGNTSDMLYSCQYDTGKKHVVCQDSHQFSFTIDTGALDTNENIGVWVMFKISSPDGYASLDNLEVIEEGPIDGEALSRVKHMEKKWNDQMEAKRSETQQAYDVAKQAIDALFTNVQDEALQFDTTLAQIQYAEYLVQSIPYVYNDWLSDVPGMNYDIYVELDARVAQARYLYDTRNIIKNGDFTQGVMGWHVTGNADVQQIDGVSVLVLSNWSAGVSQNVHLQHNHGYVLRVIAKKEGPGNGYVTLMDCEENQEKLTFTSCEEGYITKTVDVFPDTDRVRIEIGETEGSFYIESIELICMNE

SEQ ID NO: 408 - protein, 1136 aa, Bacillus thuringiensis israelensis; identical to SEQ ID NO: 404

SEQ ID NO: 409 - protein, 79 aa, Bacillus thuringiensis LDC-9
MKSLHKDPFEAIVPMTLSSNQLITIAIQPLNMTSNNQVIIDRIEIIPITQSVLDETENQNLESEREVVNALFTNDAKDA

SEQ ID NO: 410 - protein, 1230 aa, Bacillus thuringiensis Y41
MNSYENKNEYEILDASQNNSNMSNRYQRYPLAHNPQTSIQTTNYKDWLRMCENPLDMEGYDSNSVVVVSTGLIVVGTLISILSAGLGSIPIIYGTLLPVLWNDPNNPQKTWHEFMSHGETLLNQTISTVERNRAAAYLEGYTTAVKKCEEALNVWLKTPNQANARTVADLYKDTDFLFFTTLPHLKLRGYETLLLSSYTQAANMHLILLKQASKYADQWNAQLSVSVQKTANDYYTDLVKLIGEYTDYCIATYRLGLTTIKSRATSWNIYNMYRREMTILVLDLVALFPAHDIKKYPSGTKVELTREIYTDALGAVALPQNIDATEQLATRAPNLFSWLKGFKFITTQSTNRYYLSGIANQYSFTNSNGEIWGPISGNPTGVSSDLTIDNNFSIYKLSILRGYQLSPDFSFHNPVHQIDFSTTNNQQGRVQSYKSGGPTPVNPETTAIHLPIDSKCIQNCNPTFNNYSHILSYAKTFTSNLTIGTTANITSFGWTHNSVDRENTIDLNNITQIPAVKASQVYPENSVIKGPGHTGGNLVRIDSSGYMSIVCKFPLQVKGYRVRIRYAANNRAELYISSAGNSPSKNVDLDPTFSGTNYESLNYTNFKDKETEFIITEGQLVKQSIIFSTNGNVLLDKIEFIPLGTTTYEYEEKQNLEKAQKALNALFTDSTNGYLQMDTTDYDINQTASLIECVSDELYAKEKIVLLDEVKYAKRLSISRNLLLKDDLEFSAGFGENGWTTSDNISIQADNPIFKGNYLKMFGARDIDGILFPTYLYQKIEESKLKPYTRYRVRGFVGSSKDLKLVVTRYEKEIDAIMNVPNDLAHMQLNPSCGDYRCESSSQFLVNQVHPTPTAGYALDRYARPSSSDKKHIMCHDRHPFDFHIDTGELNPNTNLGIDVLFKISNPNGYATLGNLEVIEEGPLTDEALVHVKQKEKKWRQHMEKKRMETQQAYDPAKQAVDALFTNEQELDYHITLDYIKNADQLVQAIPYVHHAWLPDAPGMNYDVYQGLNARIMQAYNLYDARNIIINGDFTQGLQGWHATGKAAVQQIDGASVLVLSNWSAEVSQNLHAQDHHGYMLRVIAKKEGPGKGYVTMMDCNGKQETLTFTSCEEGYITKTIEVFPESNRIRIEMGETEGTFYVDSIELLCMQGYASNNNPHTGNMYEQSYNGNYNQNTSDVYHQGYINNYNQNSSSMYNQNYINNDDLHSGCTCNQGHNSGCTCNQGYNR

SEQ ID NO: 411 - protein, 1157 aa, Bacillus thuringiensis HS18-1
MNSYQNKNEYEILDASQNNSNMSNRYQRYPLAHNPQTSIQTTNYKDWLKMCQNPHQNPLDMEGYDSNSVVVVSTGLIVVGTLISILSAGLGSIPIIYGTLLPVLWNDPNNPQKTWHEFMSHGETLLNQTISTVERNRAAAYLEGYTTAVKNVKKHLNVWLKTPNQANARTVADLYKDTDFLFFTTLPHLKLRGYETLLLSSYTQAANMHLILLKQASKYADQWNAQLSVYVQKTANDYYTDLVKLIGEYTDYCIATYRLGLTTIKSRATSWNIYNMYRREMTILVLDLVALFPAHDIKKYPSGTKVELTREIYTDALGAVALPQNIDAIEQLATRAPNLFSWLKGFKFITTQSTNRYYLSGIANQYSFTNSNGEIWGPISGNPTGVSSDLTIDNNFSIYKLSILRGYQLSPDFSFHNPVHQIDFSTTNNQQGRVQSYKSGGPTPVNPETTAIHLPIDSKCTQNCNPTFNNYSHILSYAKTFTSNLTIGTTSNIHFVWLDAQSVDRENTIDLNNITQIPAVKASQVYPENSVIKGPGHTGGNLVRIDSSGYMSIVCKFPLQVKGYRVRIRYAANNRAELYISSAGNSPSKNVDLDPTFSGTNYESLNYTNFKDKETEFIITEGQLVKQSIIFSTNGNVLLDKIEFIPLGTTTYEYEEKQNLEKARKALNALFTDGTNGYLQMDTIDYDINQTANLIECVSDELYAKEKIVLLDEVKYAKRLSISRNLLSKDYLEFSDVFEENGWTTSDNISIQADNPIFKGNYLKMFGARDIDGTLFPTYLYQKIEESKLKPYTRYRVRGFVGSSKDLKLVVTRYEKEIDAIMNVPNDLAHMQLNPSCGDYRCESSSQFLVNQVHPTSTAGYALDMYACPLSSDKNHVMCHDRHPFDFHIDTGEVGTNTNVGIDVLFKISNPDGYATVGNLEVIEEGPLTGDALAHVKHKEKKWKQHMEKKRWKTQQAYDPAKQAVDALFTNEQELHYHITLDHIQNADRLIQAIPYVYHAWLPSAPGMNYDGYQGLNARIMQARYLYDARNIITNGDFTQGLTGWHAAGKATVQQMNGASVLVLSNWSAGVSQNLHVQDHHGYVLRVIAKKEGPGKGYVTMMDCNGNQETLKFTSCEEGYMTKTVEVFPESDRVRIEMGETEGTFYIDSIELICMNE

SEQ ID NO: 412 - protein, 1136 aa, Bacillus thuringiensis Ywc2-8
MSNRYQRYPLAHNPQTSIQTTNYKDWLKMCQNPHQNPLDMEGYDSNSVVVVSTGLIVVGTLISILSAGLGSIPIIYGTLLPVLWNDPNNPQKTWHEFMSHGETLLNQTISTVERNRAAAYLEGYTTAVKKCEEALNVWLKTPNQANARTVADLYKDTDFLFFTTLPHLKLRGYETLLLSSYTQAANMHLILLKQASKYADQWNAQLSVYVQKTANDYCTDLVKLIGEYTDYCIATYRLGLTTIKSRATSWNIYNMYRREMTILVLDLVALFPAHDIKKYPSGTKVEPTREIYTDALGAVALPQNIDAIEQLATRAPNLFSWLKGFKFITTQSTNRYYLSGIANQYSFTNSNGEIWGPISGNPTGVSSDLTIDNNFSIYKLSILRGYQLSPDFSFHNPVHQIDFSTTNNQQGRVQSYKSGGPTPVNPETTAIHLPIDSKCTQNCNPTFNNYSHILSYAKTFTSNLTIGTTSNITSFGWTHNSVDRENTIDLNNITQIPAVKASQVYPENSVIKGPGHTGGNLVRIDSSGYMSIVCKFPLQVKGYRVRIRYAANNRAELYISSAGNSPSKNVDLDPTFSGTNYESLNYTNFKYKETEFIITEGQLVKQSIIFSTNGNVLLDKIEFIPLGTTTYEYEEKQNLEKARKALNALFTDGTNGYLQMDTTDYDINQTANLIECVSDELYAKEKIVLLDEVKYAKRLSISRNLLSKDYLEFSDVFEENGWTTSDNISIQADNPIFKGNYLKMFGARDIDGTLFPTYLYQKIEESKLKPYTRYRVRGFVGSSKDLKLVVTRYEKEIDAIMNVPNDLAHMQLNPSCGDYRCESSSQFLVNQVHPTPTAGYALDMYACSLSSDKKHVMCHDRHPFDFHIDTGEAGTNTNVGIDVLFKISNPDGYATVGNLEVIEEGPLTGDALAHVKHKEKKWKQHMEKKRWKTQQAYDPAKQAVDALFTNEQELHYHITLDHIQNADRLIQAIPYVYHAWLPSAPGMNYDGYQGLNARIMQARYLYDARNIITNGDFTQGLTGWHAAGKATVQQMNGASVLVLSNWSAGVSQNLHVQDHHGYVLRVIAKKEGPGKGYVTMMDCNGNQETLKFTSCEEGYMTKTVEVFPESDRVRIEMGETEGTFYIDSIELICMNE

SEQ ID NO: 413 - protein, 1157 aa, Bacillus thuringiensis MC28
MNSYQNKNEYEILDASQNNSNMSNRYQRYPLAHNPQTSIQTTNYKDWLKMCQNPHQNPLDMEGYDSNSVVVVSTGLIVVGTLISILSAGLGSIPIIYGTLLPVLWNDPNNPQKTWHEFMSHGETLLNQTISTVERNRAAAYLEGYTTAVKNVKKHLNVWLTAPNQANARTVADLYKDTDFLFFTTLPHLKLRDFETLLLSSYTQAANMHLILLKQASKYADQWNAQLPVSVRKTANDYYTDLVKLIGEYTDYCIATYRSGLNTIKSRATSWNIYNMYRREMTILVLDLVALFPAYDIKKYPSGTKVELTREIYTDALGAVAIPQNIDATEQLATRAPNLFSWLKGFKFITTQSTNRYYLSGIANRYSFTNSNGEIWGPISGNPTGVSSDLTIDNNFSIYKLSILRGYQLSPDFSFHNPVHQIDFSTTNNQQGRVQSYKSGGPTPVNPETTAIHLPIDSKCTQNCNPTFNNYSHILSYAKTFTSNLTIGTTSNITSFGWTHNSVDRENTIDLNNITQIPAVKASQVYPENSVIKGPGHTGGNLVRIDSSGYMSIVCKFPLQVKGCRVRIRYAANNRAELYISSAGNSPSKNVDLDPTFSGTNYESLNYTNFKDKETEFIITEGQLVKQSIIFSTNGNVLLDKIEFIPLGTTTYEYEEKQNLEKAQKALNALFTDGTNGYLQMDATDYDINQTANLIECVSDELYAKEKIVLLDEVKYAKRLSISRNLLLNDDLEFSDGFGENGWTTSDNISIQADNPLFKGNYLKMFGARDIDGTLFPTYLYQKIDESRLKPYTRYRVRGFVGSSKNLKLVVTRYEKEIDAIMNVPNDLAHMQLNPSCGDYRCESSSQFLVNQVHPTPTAGYAPDMYACPSNSDEKHVMCHDRHPFDFHIDTGELNPNTNLGIDVLFKISNPNGYATLGNLEVIEEGPLTDEALVHVKQKEKKWRQHMEKKRMETQQAYDPAKQAVDALFTNEQELHYHITLDHIQNAGRLVQLIPYAHHAWLLDVPGMNYDVYTELNVRITQARYLYKERNVITNGDFTQGLTGWQETGKATVQQMDGASVLVLSNWSAGVSQNLHVQDQHGYVLRVTAKKEGPGKGYVTMMDCNGKQETLRFTSCEEGYMTKTVEVFPESDHVRIEMGETEGTFYIDSIEFLCMKG

SEQ ID NO: 414 - protein, 679 aa, Bacillus thuringiensis sotto
MNLYQNKNEYEILDASRNNSNMSNSYLRYPLESNPNQPLQKTNYKDWVNMCKGNPGGFLLSDEQYVAIVGTVISKLLGFVPVVGDILSFLADTYWPKIAGQEVDTRVWAGLIRHTANLISVENYQDALIKATTNLMGLYGALNVYNRFLADWKKSGMVFNGTLADELRKQMSTLHLMFTQTIIRDFSQPGYQAILLPSYTSAANLHLLLLRDIEIYGKELGFSQQVLDSYYRELILFTKEYTTHCVDTYNAALNAQKQKGWIAFNHYRRNMTLTVLDVITLFPSYDARKYPADKKDVKKLSKTELTREIYTAFLETSPNQTVEIMEASLTRDPHIFTWIKRLDFWTDTLYPDNKFLSANRNGFSYTNSSTVQESIVYGDSGFGSTLTHAIPINSNIYKVSITDTRSIPNRIPQVDFHKMDGTLTSYSSGIKLPPEELRTTFFGFSTNENTPNQPNSSDYTHILTYMKTGIISGGAPKRVSLAWAHKSVNPYNQIFTDDITQVPAVKSSLLNVQAKVIKGPGHTGGDLVALINNNLQAGRMDITCKTSNFNESERRYGLRIRYAANNSFSIYVSYVSSEGSIRQTSRIIESTFSRPNNIIPTDLKYDEFKYNEAFDAILPVRLSPNQSTTISIYQTNALPANQLIIDRIEFIPITQSVLDYTEKQNLEKSQKTVNNLFVS

SEQ ID NO: 415 - protein, 679 aa, Bacillus thuringiensis S2160-1
MNSYQNTNEYEILDASPSYSNMTNSYPRYPLANNRQGSMKNTNYKDWLAMCEGNVEGLFLTDEQMVSIVGAAISKLLGFVPVVGDILSSLADTYWPKIAGQEADTRVWAGLIRHTANLIDNRDVDRVIGQATANVMSLYAALGVYNRFLEQWKSPVKPYAGLADEIRAQMSTLHLLFTTKIISDFTIQGYEAILLPSYANAASLHLLLLRDISIYGEKLGFDSKTLQAYHNEQVKFTTDYTAHCIKTYNLNLNAQKSKGWVAFNQYRRDMTLTVLDLIALFPSYDTHRYPADEKNVKKLSNTELTREIYTALTESSPSKTVEAMEESLTRGPHLFTWPKRLDFWTFNYNMYPDTRYLSANRIGFSYTNSSEIEDSGIYGSPTFGTVLTHQIPLNSNVYRTSITDTTAVPNQVTKMDFYKIDGTNASYNSNITPVPANLRTTFFGFSSDANRPPNQPTVQDYNNILSYIKTDIIGGHQARVSFAWTHKGVNPNNQILTDNVTQVPAVKSSLLNAPARVIKGPGHTGGDLVALLNNGTQAGTMQIQCKTGSFTETSRRYGIRMRYAANNAFTVSLSYTLQGGNPIGITFGTERTFSRTNNIIPTDLKYEEFKYKEYNQIITMNSPQNTIVTIDIRQLNPSSNDQLIIDRIEFIPITQSVLDYTEEQNLETAQAVVDNLFTN

SEQ ID NO: 416 - protein, 679 aa, Bacillus thuringiensis S3161-3
MNSYQNTNEYEILDASPSYSNMTNSYPRYPLANNRQGSMKNTNYKDWLAMCEGNAEGLFLTDEQMVSIVGAAISKLLGFVPVVGDILSSLADTYWPKIAGQEADTRVWAGLIRHTANLIDNRDVDRVIGQATANVMSLYAALGVYNRFLEQWKSPVKPYAGLADEIRAQMSTLHLLFTTKIISDFPIQGYESILLPSYANAASLHLLLLRDISIYGEKLGFDSKTLQAYHNEQVKFTTDYTAHCIKTYNLNLNAQKSKGWVAFNQYRRDMTLTVLDLIALFPSYDTHRYPADEKNVKKLSNTELTREIYTALTESSPSKTVEAMEESLTRGPHLFTWPKRLDFWTFNYNMYPDTRYLSANRIGFSYTNSSEIEDSGIYGSPTFGTVLTHQIPLNSNVYRTSITDTTAVPNQVTKMDFYKIDGTNASYNSNITPVPANLRTTFFGFSSDANRPPNQPTVQDYNNILSYIKTDIIGGHQARVSFAWTHKGVNPNNQILTDNVTQVPAVKSSLLNAPARVIKGPGHTGGDLVALLNNGTQAGTMQIQCKTGSFTETSRRYGIRMRYAANNAFTVSLSYTLQGGNPIGITFGTERTFSRTNNIIPTDLKYEEFKYKEYNQIITMNSPQNTIVTINIRQLNPSSNDQLIIDRIEFIPITQSVLDYTEEQNLETAQAVVDNLFTN

SEQ ID NO: 417 - protein, 309 aa, Bacillus thuringiensis F14-1
MIFLAILDLKSLVLNAINYWGPKNNNGIQGGDFGYPISEKQIDTSIITSTHPRLIPHDLTIPQNLETIFTTTQVLTNNTDLQQSQTVSFAKKTTTTTSTSTTNGWTEGGKISDTLEEKVSVSIPFIGEGGGKNSTTIEANFAHNSSTTTFQQASTDIEWNISQPVLVPPRKQVVATLVIMGGNFTIPMDLMTTIDSTEHYSGYPILTWISSPDNSYNGPFMSWYFANWPNLPSGFGPLNSDNTVTYTGSVVSQVSAGVYATVRFDQYDIHNLRTIEKTWYARHATLHNGKKISINNVTEMAPTSPIKTN

SEQ ID NO: 418 - protein, 309 aa, EG2934
MAILDLKSLVLNAINYWGPKNNNGIQGGDFGYPISEKQIDTSIITFTHPRLIPYDLTIPQNLETIFTTTQVLTNNTDLQQSQTVSFAKKTTTTTSTSTTNGWTEGGKISDTLEEKVSVSIPFIGEGGGKNSTTIEANFAHNSSTTTFQQASTDIEWNISQPVLVPPSKQVVATLVIMGGNFTIPMDLMTTIDSTEHYSHYSGYPILTWISSPDNSYSGPFMSWYFANWPNLPSGFGPLNSDNTVTYTGSVVSQVSAGVYATVRFDQYDIHNLRTIEKTWYARHATLHNGKKISINNVTEMAPTSPIKTN

SEQ ID NO: 419 - protein, 695 aa, Bacillus thuringiensis Y41
MNFYQNTNEYEILDASQNNSTMSNRYPRYPLANNPQMPMRNTNYKDWLNMCEGNPAPLSSPSQLLKVAGNIVPRILGTLPTFFPGIGPFVPFLTFFTGLLWPSGSSGNDIWEKVMKEVADLIDQRLEENILRQATANLAGLKELLQSYNSAFATWEAGNATPGLVKGYMESLHRTFVQDIIGSFTIPNYENILLPTYAIAANFHLMLLRDIEIYGGEKTPEGKDGLNFNPKDLNFYNCELKKYKELYTNHCLNTYDKGLASEKEKGWVPFHRYRREMTLAVLDIIASFPLYDARLYPAKNNKEMSVKSELTREIYSDVINSDRFGVVPPYNYAQNEERYTRPPHLFTWLRGLDFVTNRLTSGSYSYRWYVLTGCQNKYSYTKGNGTIPGPFRGYPVESGGSASNITIEEGSYIYNLLPKSFEYISPWYFTTNIAMITFLLTNNKNDLPAKFYGSLVNQPNLPIVQTDFDFVTNKELTGPPTYNNYSHILSHMLLGYDWNQTGGIGTHGYSFAFTHSSVDPYNTIAPDKITQIPAVKAFEISDSGPGYVVAGRGDTGGDIVWLKNSARLKIRLTSATPNKNYLVRVRCMARISGNILVERWSLSSTKNDTFGVQGTLKYEYVNTLVTTFDQPGVELIIKNLTGNDMYFDKVDFIPIDIPIDKCTKCQFVGGVCTCSCPTLQSLDTEKEIVNSLFVE

SEQ ID NO: 420 - protein, 703 aa, Bacillus thuringiensis BM59-2
MNSYQNKNEYEILDASQNNSNMSNRYPRYPLANDPQASMQNTNYKDWLATCNGTPAPLYNSSQLLKISGNVVSRALGMLPIPGIAPLLSFLSTLLWPSGSSGNTIWESLMKEAADLIDQKLEENILRQATANLAGLQGLLGSYNSAFASWEAGGNATPDLVKGYMESLHRTFVQDIIGSFTIPGYEKILLPTYAITANFHLMLLRDIEIYGGKKTPEGKDGLNFDPKDLNFYNCELKKYKELYTNHCLNTYNKGLASEKEKGWVPFHRYRREMTLAVLDIIALFPLYDARLYPAKNNKEMPVKSELTREIYSDVINSDRFGVVPPYNYAQNEERYTRPPHLFTWLRGLDFVTNVLTSGTWVYRWSVLTGLSKEIFLYKREWYYNWSFSGLSCRVWWKNFQHYYCRRFLYLELVAKKLSIYFPLVFYDKYRTDYFLTNKNNSSTEKVYGYVAGNANLPTVQTDFDFLTNKEVTGPPTYNNYNHILSYLLLGYDWNQTGGIGTHGYSFAFTHSSVDPYNTIAPDKITQIPAVKAFEISDAGPSQVIAGPGHTGGDVVRLYLSGRLKIRLTPASTNKNYLVRVRYASPVSGTLRVERWSPSSVTNRDFTRLATGGFNSFGYVDTLVTTCNQSGVEIIIQNLGASDVIIDKVEFIPYDIPIDKCTKCEFEGNVCTCRCEGVQSLEKEKEIVNSLFVKENKVCTEVGG

SEQ ID NO: 421 - protein, 669 aa, Bacillus thuringiensis Y41
  MISC_FEATURE (522)..(522): Xaa is Ala, Arg, Asn, Asp, Asx, Cys, Glu, Gln, Glx, Gly, His, Ile, Leu, Lys, Met, Phe, Pro, Ser, Thr, Trp, Tyr, or Val.
MNSYQNKNEYEILDASQNNSTMSNHYPRYPLAKDPLASMQNTNYKDWLNLCDTPNMENPEFQSVGRSALSILINLSSKILSLLGIPFAAQIGQLWSYTLNLLWPVANNATQWDIFMRTIEDLINVRIETSVRNRALAELEGLGNILEDYKVALRRWDLNPTNLDRQSEVVSQFEIVHAFFRVQMPVFAIRDFEVPLLPVYASAANLHLLLLRDVVINGDRWGLSAARINDYHDLQLRLTSTYTDHCVNWYNTGLNRLIGTNARQWVTYNQFRREMTISVLDIISLFSNYDARRYPTKTQSELTRMIYTDPIGAVGTIGLNPGWLDNAPSFSVIENSVVQSPRTFLFLERVGIFTGVLHGWSSQSQFWSAHRLFLSNLSSIWESIIYGNPQNNIGYEEVDFTNFDVFSINSRATSIMSPFGGGELFGVPRVTFDLSNRTNNSLAQRTYNRPFTFGGQDIVSRLPGETTEIPNSSNFSHRLAYISSFRVGIAGSVLSYGWTHHSVDRHMRLNPNMITQIPAVKXVSGHIVSGPGHTGGDILRVHSGSQGTIIIQSNSAQRYRLRLRYSSTLPGDLILNHRGTDGSQQFIEFTLPATSGQLRFADFTYADGRTVFQTPNSHVFYTVHVQTRSNGIFFIDKIDYIPENTPPLECGGERNLEKEKKAVNDLFTN

SEQ ID NO: 422 - protein, 668 aa, Bacillus thuringiensis MC28
MNSYQNKNEYEILDASQNNSNMSTHYPRYPLAKDPQASMQNTNYKDWLNLCDTPNMENPEFQSVGRSALSILINLSSRILSLLGIPFAAQIGQLWSYTLNLLWPVANNATQWEIFMRTIEDLINVHIETSVRNRALAELAGLGNILEDYKVVLQRWNLNPTNPTLQRDVVRQFEIVHAFFRFQMPVFAVAGFEVPLLPVYASAANLHLLLLRDVVINGARWGLESDVINDYHDLQLRLTSTYVDHCVTWYNTGLNRLIGTNARQWVTYNQFRREMTISVLDIISLFSNYDVRRYPTKIQNELTRMIYTDPVGTEGNQFIPGWLDNAPSFSVIENSVVRSPGAFTFLERVGIFTGFLHGWSSRSEFWSAHRLFSRPVLGGIWESVIFGNPQNNIGYQEVDFTNFDVFSINSRATSHMFPNGSARLFGVPQVTFNLSNINNNSPAQRIYNRQFTFGGQDIVSRLPGETTEIPNSSNFSHRLAHISSFPVGNNGSVLSYGWTHHSVNRHNRLNPDMITQIPAVKGIGGQIVSGPGHTGGDILRFNRLNQGTIVVQSNSAQRYRIRLRYSSSLPGDLILNHIGSDGSQQFIEFTLPATSGQLRFADFTYADGRTVFQTPNSHVFYTVHVQTRSDATVFIDKIDYIPENTPTLERGGERYLEKEKKVVNDLFT

SEQ ID NO: 423 - protein, 673 aa, Bacillus thuringiensis MC28
MSMKSLIQRIYLVLLTEILTILDTLLQIIRINHYKNWINMCQKNQQYGENLETFASADTIAGVSAGVIVVGTMLGAFAAPITAGLIISFGTLLPIFWKPGEDPKTVWQAFLKIGNRPFSSPVDQALIDLLSNKARSLESQFNDFQRYFDIWNNNKTPGNAGEVLRRFSSLDADIIRELEQLKGNYYITVLPGYAQVANWHLNLLRIAAFYYDQWASSSNLSIQSIYPEDYINDLQTCLTNCAIESGNKISSKYYKCVLKCRINEYINYCSKTYQEGLNILKNSSGLKWNEYNTYRREMTLNVLDLIAVFPNYDPDKYLISTKSQLTREIYTDALIDAFANAHFNINDIENSLTRPPGLVTWINRLDFYTGMFTKSVPGLTANGINYSFTNGNSNDSPIYGYRLSDDSSTPIQIPRNQYVYNMLITYLRDSPSVIQKIEFNLNNQQTRTYDTGLTLAPTYQSTINLSLPGKDRSFPPKFNNYTHFLSYVKTAPGDERPSSSRARNVCFGWMHFSVNDYDVLAGGYNTISNKIITQIPAVKARHLPLPSFVMPGPGHTGGNLVVLSTQIEFQCIVLNPVSYKIRMRYVAYSPNRSINLTVSIRSEIGNYQNIVPNISSTVQSPEDTKNPKYEHFQYLDISIPLELFGITNITITRSDSISNNTLIIDKIEFTPDV

SEQ ID NO: 424 - protein, 699 aa, Bacillus thuringiensis S2160-1
MNHNNNNNKYEIIDSHASPYPSNKNSNHSRYPYTNNTNYKDWLNICQQNQQYDEGFETFESADTIAAVSAGIIVAGTMLSAFTSPLGPALIISFGTLLPIFWKPGEDPKTVWKAFVKIGYRPFGLPVDEAIVNLLYNKVDALKTQFEDYQRYFDIWKANPTSQNADAVKNKFLTLDTLVIGTLQELKKDYAIILLPGYTQIANWHLNLLRQAADNYDKWAPSSNLSIQSIYPQDYISDLNTCLTNCSTESNNKVSSKYYKCILKCRTAEYINHCSEKYQDGLNQLKNSSNINWDIYNAYRREMTFTVLDHIAIFPNYDPEKYPTGTHSELTREIYTDAVMRRYETGSPIPIAQREQELTRTPHLFSRLNKFTLFTAKNILPGLHAVQNHFSYTNDSTVRLSPIYKPENLSEPNTDNPPPFDISNTAVRSIAVKRRYEYYHITAIDFDTIDGNPRRYNSGYTPENLGIDYFIFTEFPAGKIPPYGLGTKYTHILSYIKISPRGNLSLPAERELSFAWTHTSVNFNNTISNTITTQIPAVKAKSLDPSSSVISGPGHTGGDLVSLRSSMQIMCYVPTAARYQIRMRCVAYSPNRSINLTLNIAGVTNYSLRALGIGSIKNIINPKYDDFQYIYFQTEDPQQVATVNLSSNFTMFLNSSDFADNTILIDKFEFIPITNTLEENLETQKLEKIQQTVNTLFTN

SEQ ID NO: 425 - protein, 362 aa, YBacillus thuringiensis 1518
MNKKSITHEEFIRQLKEYNLDNNLNYHDPAVLKKINELLPADQQYDLISPTQDWYQFKTLYPISKNGVIISSNLDDSSNVLVPELSENPYDPIPQSGKSTIQTAVRSPEALYIILTTNNSLSFGGGTNTMIATRIALLSVTRPELYQAITKVNYVYKSGQTAPRNAPVAYIELSPNNSYVQTLLNDSHMKRTSSYELVGSSIARRGIETKWSKSHTSGVSDTDSWSLAVSAGIDIEWDVGIPLTASAKEKLSLSITGTYGQSTTVSSQDTITQEYTFAKPGKDYKYDDYAYAVYQLKSNYQFIAGDAFNNLINSLSFGNQFSVHGDASYQYSTDTIFSTQTPDPTPTNEKSLIQVNFNPRFS

SEQ ID NO: 426 - protein, 663 aa, Bacillus thuringiensis Ywc2-8
MNSYQNKNEYEISDASRNNSNMSTRYPRYPLANNPQMPMRNTNYKEWLAMCADNKDNEQVPISPLDQEWRTVLPILFSAAASLTGLISLPTFGAISAGAAIAAALTSILFPSQGPDVFNELMGATENLLKREIETYVRGRAASELLALEDQRAYFKSAFDYWRLHPTDGNAIATVAARFHTVNGAFVTAMRLFRPAGYEALLLPVYAQAARLHLLHLRDGVLFANEWGLAKPDPGDLHDQEFNAKAAEYADYCELTYNTELNRIKTTSGKTWFDYNQYRRLMTFAVLDVVAKFSILNPRIYSLALQGEILTRKIYTDPVNFSPGSSIADDENRYTVPPSHVRQLVNSRLFTNVASVQNAGFIGNQNRYKNIGVSDLVDGPIIGQSVFEKVDADIPTNVSVFEVGVNGIQNDYPRNIGLKKTPSNAFTNNYAGSTNNLGPFTTVSLPPKDDKPLDHTNFSHRLSDIILPGNKGSSFAWTHVDVDPTGNYLSTTKINLIPATKASKLPLSFQLRKGPGFIGGDLVRLGNGVGISYKFNFQSSDSSANFRIRIRYAGAGSGASGGGQVYFKLGNYQSPDTSWGHTGFDSNNVKYNQFKVLELLGTAGNITANDLEIIVWTRDPGASDFYLDRLELIPMTGISTEYNEPQKLETAKKAVNDLFTNNL

SEQ ID NO: 427 - protein, 663 aa, Bacillus thuringiensis G7-1
MNSYQNKNEYEILDASRNNSNMSTRYPRYPLANNPQMPMRNTNYKEWLAMCADNKNNEQVPISPLDQEWRTVLPILFSAAASLTGLISLPTFGAISAGAAIAAALTSILFPSQGPDVFNELMGATENLLKREIETYVRGRAASELLALEDQRAYFKSAFDYWRLHPTDGNAIATVAARFHTVNGAFVTAMRLFRPAGYEALLLPVYAQAARLHLLHLRDGVLFANEWGLAKPDPGDLHDQEFNAKAAEYADYCELTYNTELNRIKTTSGKTWFDYNQYRRLMTFAVLDVVAKFSILNPRIYSLALQGEILTRKIYTDPVNFSPGSSIADDENRYTVPPSHVRQLVNSRLFTNVASVQNAGFIGNQNRYKNIGVSDLVDGPIIGQSVFEKVDADIPTNVSVFEVGVNGIQNDYPRNIGLKKTPSNAFTNNYAGSTNNLGPFTTVSLPPKDDKPLDHTNFSHRLSDIILPGNKGSSFAWTHVDVDPTGNYLSTTKINLIPATKASKLPLSFQLRKGPGFIGGDLVRLGNGVGISYKFNFQSSDSSANFRIRIRYAGAGSGASGGGQVYFKLGNYQSPDTSWGHTGFDSNNVKYNQFKVLELLGTAGNITANDLEIIVWTRDPGASDFYLDRLELIPMTGISTEYNEPQKLETAKKAVNDLFTNNL

SEQ ID NO: 428 - protein, 665 aa, Bacillus thuringiensis kim LBIT-980
MNSYQKKNDYEILNASPSYFNTLDSYPRYPLANDPQASMQTRNYKDWQNECEGITPSGFGAFSFIISIIIQFQSFLSEPSLSGGLGIGLDIADSLIADDVSQLSAREVRDLIQSGLTDLAISIASGSFNDIVEKYRDYLEVFKRWESGGRTDDDTRETIGRLIMDAERAAAELNQFSHGDYKIPLLPTYAQAANLHLKILRDILIHGEDLQIISTADRQFYRDKLFGGLKNYTNYCVDQYNAGLNQIKEAGTSAANWLRFHRFRREMTLSVLDLIALFPTYDIDSYDLPVNVELSRIIYTDPVGWTVEGMSTIYPWYSPYNRLAFNQLEAETIRGPYLSTWLDYIDIYSSQYSSLKVWSGNANTMKTIGGETRRQDGSAVGTPQRITVGNTDIFKVELTAGVHHFLIDYTNPNPLRSYGIINSKFFMTNGSTPTYTGSVGSMHTQTGKVAALPGVESEVPTANDYTHRLSDVINLTGGLPQHGSNSVRSSLVAHGWTHKSLKRENIIEANQISQIPAVKSYSMSGGLTVRHVSDHTGGDVVYFAQVGRVKILCKFTSPGYYKMRIRYASDYSATMTVNGIPVSLSSTTQVRSNLPYEAFQYAQVGPNHVFAVLTPKTLEFDIYGGVNGFMIDKIEFIPSNITTLEYEEERDLEKTKNAVNDLFIN

SEQ ID NO: 429 - protein, 1385 aa, Bacillus thuringiensis darmstadiensis PS17
MAILNELYPSVPYNVLAYTPPSFLPDAGTQATPADLTAYEQLLKNLEKGINAGTYSKAIADVLKGIFIDDTINYQTYVNIGLSLITLAVPEIGIFTPFIGLFFAALNKHDAPPPPNAKDIFEAMKPAIQEMIDRTLTADEQTFLNGEISGLQNLAARYQSTMDDIQSHGGFNKVDSGLIKKFTDEVLSLNSFYTDRLPVFITDNTADRTLLGLPYYAILASMHLMLLRDIITKGPTWDSKINFTPDAIDSFKTDIKNNIKLYSKTIYDVFQKGLASYGTPSDLESFAKKQKYIEIMTTHCLDFARLFPTFDPDLYPTGSGDISLQKTRRILSPFIPIRTADGLTLNNTSIDTSNWPNYENGNGAFPNPKERILKQFKLYPSWRAGQYGGLLQPYLWAIEVQDSVETRLYGQLPAVDPQAGPNYVSIDSSNPIIQINMDTWKTPPQGASGWNTNLMRGSVSGLSFLQRDGTRLSAGMGGGFADTIYSLPATHYLSYLYGTPYQTSDNYSGHVGALVGVSTPQEATLPNIIGQPDEQGNVSTMGFPFEKASYGGTVVKEWLNGANAMKLSPGQSIGIPITNVTSGEYQIRCRYASNDNTNVFFNVDTGGANPIFQQINFASTVDNNTGVQGANGVYVVKSIATTDNSFTEIPAKTINVHLTNQGSSDVFLDRIEFIPFSLPLIYHGSYNTSSGADDVLWSSSNMNYYDIIVNGQANSSSIASSMHLLNKGKVIKTIDIPGHSETFFATFPVPEGFNEVRILAGLPEVSGNITVQSNNPPQPSNNGGGDGGGNGGGDGGQYNFSLSGSDHTTIYHGKLETGIHVQGNYTYTGTPVLILNAYRNNTVVSSIPVYSPFDITIQTEADSLELELQPRYGFATVNGTATVKSPNVNYDRSFKLPIDLQNITTQVNALFASGTQNMLAHNVSDHDIEEVVLKVDALSDEVFGDEKKALRKLVNQAKRLSRARNLLIGGSFENWDAWYKGRNVVTVSDHELFKSDHVLLPPPGLSPSYIFQKVEESKLKPNTRYIVSGFIAHGKDLEIVVSRYGQEVQKVVQVPYGEAFPLTSNGPVCCPPRSTSNGTLGDPHFFSYSIDVGALDLQANPGIEFGLRIVNPTGMARVSNLEIREDRPLAANEIRQVQRVARNWRTEYEKERAEVTSLIQPVINRINGLYENGNWNGSIRSDISYQNIDAIVLPTLPKLRHWFMSDRFSEQGDIMAKFQGALNRAYAQLEQSTLLHNGHFTKDAANWTIEGDAHQITLEDGRRVLRLPDWSSSVSQMIEIENFNPDKEYNLVFHGQGEGTVTLEHGEETKYIETHTHHFANFTTSQRQGLTFESNKVTVTISSEDGEFLVDNIALVEAPLPTDDQNSEGNTASSTNSDTSMNNNQ

SEQ ID NO: 430 - protein, 1289 aa, Bacillus thuringiensis darmstadiensis PS17
MAILNELYPSVPYNVLAYTPPSFLPDAGTQATPADLTAYEQLLKNLEKGINAGTYSKAIADVLKGIFIDDTINYQTYVNIGLSLITLAVPEIGIFTPFIGLFFAALNKHDAPPPPNAKDIFEAMKPAIQEMIDRTLTADEQTFLNGEISGLQNLAARYQSTMDDIQSHGGFNKVDSGLIKKFTDEVLSLNSFYTDRLPVFITDNTADRTLLGLPYYAILASMHLMLLRDIITKGPTWDSKINFTPDAIDSFKTDIKNNIKLYSKTIYDVFQKGLASYGTPSDLESFAKKQKYIEIMTTHCLDFARLFPTFDPDLYPTGSGDISLQKTRRILSPFIPIRTADGLTLNNTSIDTSNWPNYENGNGAFPNPKERILKQFKLYPSWRAAQYGGLLQPYLWAIEVQDSVETRLYGQLPAVDPQAGPNYVSIDSSNPIIQINMDTWKTPPQGASGWNTNLMRGSVSGLSFLQRDGTRLSAGMGGGFADTIYSLPATHYLSYLYGTPYQTSDNYSGHVGALVGVSTPQEATLPNIIGQPDEQGNVSTMGFPFEKASYGGTVVKEWLNGANAMKLSPGQSIGIPITNVTSGEYQIRCRYASNDNTNVFFNVDTGGANPIFQQINFASTVDNNTGVQGANGVYVVKSIATTDNSFTVKIPAKTINVHLTNQGSSDVFLDRIEFVPILESNTVTIFNNSYTTGSANLIPAIAPLWSTSSDKALTGSMSITGRTTPNSDDALLRFFKTNYDTQTIPIPGSGKDFTNTLEIQDIVSIDIFVGSGLHGSDGSIKLDFTNNNSGSGGSPKSFTEQNDLENITTQVNALFTSNTQDALATDVSDHDIEEVVLKVDALSDEVFGKEKKTLRKFVNQAKRLSKARNLLVGGNFDNLDAWYRGRNVVNVSNHELLKSDHVLLPPPGLSPSYIFQKVEESKLKRNTRYTVSGFIAHATDLEIVVSRYGQEIKKVVQVPYGEAFPLTSSGPVCCIPHSTSNGTLGNPHFFSYSIDVGALDVDTNPGIEFGLRIVNPTGMARVSNLEIREDRPLAANEIRQVQRVARNWRTEYEKERAEVTSLIQPVINRINGLYDNGNWNGSIRSDISYQNIDAIVLPTLPKLRHWFMSDRFSEQGDIMAKFQGALNRAYAQLEQNTLLHNGHFTKDAANWTVEGDAHQVVLEDGKRVLRLPDWSSSVSQTIEIENFDPDKEYQLVFHGQGEGTVTLEHGEETKYIETHTHHFANFTTSQRQGLTFESNKVTVTISSEDGEFLVDNIALVEAPLPTDDQNSEGNTASSTNSDTSMNNNQ

SEQ ID NO: 431 - protein, 931 aa, Bacillus thuringiensis L366
MAILNELYPSVPYNVLAYTPPSFLPDAGTQATPADLTAYEQLLKNLEKGINAGTYSKAIADVLKGIFIDDTINYQTYVNIGLSLITLAVPEIGIFTPFIGLFFAALNKHDAPPPPNAKDIFEAMKPAIQEMIDRTLTADEQTFLNGEISGLQNLAARYQSTMDDIQSHGGFNKVDSGLIKKFTDEVLSLNSFYTDRLPVFITDNTADRTLLGLPYYAILASMHLMLLRDIITKGPTWDSKINFTPDAIDSFKTDIKNNIKLYSKTIYDVFQKGLASYGTPSDLESFAKKQKYIEIMTTHCLDFARLFPTFDPDLYPTGSGDISLQKTRRILSPFIPIRTADGLTLNNTSIDTSNWPNYENGNGAFPNPKERISKQFKLYPSWRAGQYGGLLQPYLWAIEVQDSVETRLYGQLPAVDPQAGPNYVSIDSSNPIIQINMDTWKTPPQGASGWNTNLMRGSVSGLSFLQRDGTRLSAGMGGGFADTIYSLPATHYLSYLYGTPYQTSDNYSGHVGALVGVSTPQEATLPNIIGQPDEQGNVSTMGFPFEKASYGGTVVKEWLNGANAMKLSPGQSIGIPITNVTKQNYQVRCRYASNSDNPVFFNVDTGGANPIFQQINFESTVDSNMGVKGENGVYVVKSIATTDNSFTVKIPAKTINVHLTNQGSSDIFLDRIEFIPFKLTLSPTPITLDPMKTITASVLSATRASDGITTINDPVDGTLLSLPMGTSIDFSILNPTQTGTYQVSILYKSSSGGFTITKVTNDQNGQMVDYASTSELQYSNPIYVLSSNTGNTVLTIGPGGYSGPDLLIKEIRFTPATPNSSNKIDTDFQLVDGQGTVTIWKSDKIAYTLADIDIQISFNQTAWQSPNITPYLNDDPVGGIATFYNTTGESQHFTKDSLLFQRGFNNIRVNNGFGGATISGHMKANVIDNPS

SEQ ID NO: 432 - protein, 1245 aa, Bacillus thuringiensis PS86Q3
MATINELYPVPYNVLAHPIKEVDDPYSWSNLLKGIQEGWEEWGKTGQKKLFEDHLTIAWNLYKTGKLDYFALTKASISLIGFIPGAEAAVPFINMFVDFVWPKLFGANTEGKDQQLFNAIMDAVNKMVDNKFLSYNLSTLNKTIEGLQGNLGLFQNAIQVAICQGSTPERVNFDQNCTPCNPNQPCKDDLDRVASRFDTANSQFTQHLPEFKNPWSDENSTQEFKRTSVELTLPMYTTVATLHLLLYEGYIEFMTKWNFHNEQYLNNLKVELQQLIHSYSETVRTSFLQFLPTLNNRSKSSVNAYNRYVRNMTVNCLDIAATWPTFDTHNYHQGGKLDLTRIILSDTAGPIEEYTTGDKTSGPEHSNITPNNILDTPSPTYQHSFVSVDSIVYSRKELQQLDIATYSTNNSNNCHPYGLRLSYTDGSRYDYGDNQPDFTTSNNNYCHNSYTAPITLVNARHLYNAKGSLQNVESLVVSTVNGGSGSCICDAWINYLRPPQTSKNESRPDQKINVLYPITETVNKGTGGNLGVISAYVPMELVPENVIGDVNADTKLPLTQLKGFPFEKYGSEYNNRGISLVREWINGNNAVKLSNSQSVGIQITNQTKQKYEIRCRYASKGDNNVYFNVDLSENPFRNSISFGSTESSVVGVQGENGKYILKSITTVEIPAGSFYVHITNQGSSDLFLDRIEFVPKIQFQFCDNNNLHCDCNNPVDTDCTFCCVCTSLTDCDCNNPRGLDCTLCCQVENQLPSFVTLTDLQNITTQVNALVASSEHDTLATDVSDYEIEEVVLKVDALSGEVFGKEKKALRKLVNHTKRLSKARNLLIGGNFDNLDAWYRGRNVVNVSDHELFKSDHVLLPPPTLYSSYMFQKVEESKLKANTRYTVSGFIAHAEDLEIVVSRYGQEVKKVVQVPYGEAFPLTSRGAICCPPRSTSNGKPADPHFFSYSIDVGTLDVEANPGIELGLRIVERTGMARVSNLEIREDRPLKKNELRNVQRAARNWRTAYDQERAEVTALIQPVLNQINALYENEDWNGAIRSGVSYHDLEAIVLPTLPKLNHWFMSDMLGEQGSILAQFQEALDRAYTQLEESTILHNGHFTTDAANWTIEGDAHHAILEDGRRVLRLPDWSSSVSQTIEIENFDPDKEYQLVFHAQGEGTVSLQHGEEGEYVETHPHKSANFTTSHRQGVTFETNKVTVEITSEDGEFLVDHIALVEAPLPTDDQSSDGNTTSNTNSNTSMNNNQ

SEQ ID NO: 433 - protein, 1245 aa, YBacillus thuringiensis 1518
MATINELYPVPYNVLAHPIKEVDDPYSWSNLLKGIQEGWEEWGKTGQKKLFEDHLTIAWNLYKTGKLDYFALTKASISLIGFIPGAEAAVPFINMFVDFVWPKLFGANTEGKDQQLFNAIMDAVNKMVDNKFLSYNLSTLNKTIEGLQGNLGLFQNAIQVAICQGSTPERVIFDQNCTPCNPNQPCKDDLDRVASRFDTANSQFTQHLPEFKNPWSDENSTQEFKRTSVELTLPMYTTVATLHLLLYKGYIEFMTKWNFHNEQYLNNLKVELQQLIHSYSETVRTSFLQFLPTLNNRSKSSVNAYNRYVRNMTVNCLDIAATWPTFDTHNYHQGGKLDLTRIILSDTAGPIEEYTTGDKTSGPEHSNITPNNILDTPSPTYQHSFVSVDSIVYSRKELQQLDIATYSTNNSNNCHPYGLRLSYTDGSRYDYGDNQPDFTTSNNNYCHNSYTAPITLVNARHLYNAKGSLQNVESLVVSTVNGGSGSCICDAWINYLRPPQTSKNESRPDQKINVLYPITETVNKGTGGNLGVISAYVPMELVPENVIGDVNADTKLPLTQLKGFPFEKYGSEYNNRGISLVREWINGNNAVKLSNSQSVGIQITNQTKQKYEIRCRYASKGDNNVYFNVDLSENPFRNSISFGSTESSVVGVQGENGKYILKSITTVEIPAGSFYVHITNQGSSDLFLDRIEFVPKIQFQFCDNNNLHCDCNNPVDTDCTFCCVCTSLTDCDCNNPRGLDCTLCCQVENQLPSFVTLTDLQNITTQVNALVASSEHDTLATDVSDYEIEEVVLKVDALSGEVFGKEKKALRKLVNHTKRLSKARNLLIGGNFDNLDAWYRGRNVVNVSDHELFKSDHVLLPPPTLYSSYMFQKVEESKLKANTRYTVSGFIAHAEDLEIVVSRYGQEVKKVVQVPYGEAFPLTSRGAICCPPRSTCNGKPADPHFFSYSIDVGTLDVEANPGIELGLRIVERTGMARVSNLEIREDRPLKKNELRNVQRAARNWRTAYDQERAEVTALIQPVLNQINALYENEDWNRAIRSGVSYHDLEAIVLPTLPKLNHWFMSDMLGEQGSILAQFQEALDRAYTQLEESTILHNGHFTTDAANWTIEGDAHHAILEDGRRVLRLPDWSSSVSQTIEIENFDPDKEYQLVFHAQGEGTVSLQHGEEGEYVETHPHKSANFTTSHRQGVTFETNKVTVEITSEDGEFLVDHIALVEAPLPTDDQSSDGNTTSNTNSNTSMNNNQ

SEQ ID NO: 434 - protein, 1245 aa, Bacillus thuringiensis zjfc85
MATINELYPVPYNVLAHPIKEVDDPYSWSNLLKGIQEGWEEWGKTGQKKLFEDHLTIAWNLYKTGKLDYFALTKASISLIGFIPGAEAAVPFINMFVDFVWPKLFGANTEGKDQQLFNAIMDAVNKMVDNKFLRYNLSTLNKTIEGLQGNLGLFQNPIQVAICQGSTPERVIFDQNCTPCNPNQPCKDDLDRVASRFDTANSQFTQHLPEFKNPWSDENSTQEFKRTSVELTLPLYTTVATLHLLLYKGYIEFMTKWNFHNAQYLNNLKVELQQLIHSYSETVRTSFLQFLPTLNNRSKSSVNAYNGYVRNMTVNCLDIAATWPTFDTHNYHQGRKLDLTRIILSDTAGPIKEYTTGDKTSGPQHSNITPNNILDTPSPTYQHSFVSVDSIVYSRKELQQLDIATYSTNNSNNCHPYGLRLSYTDGSRYDYGDNQPDFTTSNNNYCHNSYTAPITLVNARHLYNAKGSLQNVESLVVSTVNGGSGSCICDAWINYLRPPQTSKNESRPDQKINVLYPITETVNKGTGGNLGVISAYVPMELVPENVIGDVNADTKLPLTQLKGFPFEKYGSEYNNRGISLVREWINGNNAVKLSNSQSVGIQITNQTKQKYEIRCRYASKGDNNVYFNVDLSENPFRNSISFGSTESSVVGVQGENGKYILKSITTVEIPAGSFYVHITNQGSSDLFLDRIEFVPKIQFQFCDNNNLHCDCNNPVDTDCTFCCVCTSLTDCDCNNPRGLDCTLCCQVENQLPSFVTLTDLQNITTQVNALVASSEHDTLATDVSDYEIEEVVLKVDALSGEVFGKEKKALRKLVNHTKRLSKARNLLIGGNFDNLDAWYRGRNVVNVSDHELFKSDHVLLPPPTLYSSYMFQKVEESKLKANTRYTVSGFIAHAEDLEIVVSRYGQEVKKVVQVPYGEAFPLTSRGAICCPPRSTCNGKPADPHFFSYSIDVGTLDVEANPGIELGLRIVERTGMARVSNLEIREDRPLKKNELRNVQRAARNWRTAYDQERAEVTALIQPVLNQINALYENEDWNRAIRSGVSYHDLEAIVLPTLPKLNHWFMSDMLGEQGSILAQFQEALDRAYTQLEESTILHNGHFTTDAANWTIEGDAHHAILEDGRRVLRLPDWSSSVSQTIEIENFDPDKEYQLVFHAQGEGTVSLQHGEEGEYVETHPHKSANFTTSHRQGVTFETNKVTVEITSEDGEFLVDHIALVEAPLPTDDQSSDGNTTSNTNSNTSMNNNQ

SEQ ID NO: 435 - protein, 1327 aa, Bacillus thuringiensis T13001
MATLNNMFSVPYNVLALPIIPNSILTFEDNRKKIEEGIKEFEKTGRIKPLKDLIELIFKGYSDDESSYAALVQTMLVVIPLAFPELAPVLPIIGVVINFVFPGLKGSAKSTYTMITEMVDKAINQSFTAQITNILTNNITGIQNNIQSVYDAMSNAIGTNDTIHNFIRNNDTTPCSQNNQPACPCPPNNQCLQKVVDEYTKAIANIDLIIPQFHDPLTGVISDLATANMYILPLYAQTVNLKLILRQSFIEFMEKYKYDEKETVFQAFINADIPEQIKKLRQDIITYTKDIYMQFEAHAPYPTYNSKKQLNDYIRYTRIIQVYCLDLVAMWPTLDRVNYALPVQQNMTRIIFGDLIGPVETVPQVPRQNSDNFHFNLSDVYRNPLPNNDIFNYRYGGLQISKAQFMTYYKKFGAFSTHDEYYYVDGHRLSFNTSDKKTIEINAHQNSHDTIEKDVIDQLGGYVTRMNMVSQEIGSGSILGGNAIDRTALTTSTGDKDILAAGFNAINNGNYKTEGRGASHNQDVPNHKVQAIYPVQPNKYEYDDYGSEEKYGYLYTLIPMDVSFIPQLNAEDVITTIPAEQAVKINGQSVIDTVNTNSLLEFVNGANAIKLSPGETAQYTMINPVNRSYQVRVRVATEGETQLDIIAPVDSNTLNLSNTKTTANDQNGILGKQGNYIVFPQPNIDTVTGTSLPPTENIMNFPVGTFDFTIVNSGNSDTILDRIEFVPIVTSNKIQQDFTISPGTSQVIWTGNSANTIDITIIDNVDTSGLFVQIFQKGKQLHGELTLIDPAHIQRTFSEKFDQIVLYNPGYNSSISGTVSGSVSSIPKKFELSSDLQNITNQVNNLFASSEHDTLATDVSDYDIEEVILKVDALSDEVFGKEKKALRKLVNQAKRLSKARNLLLGGSFDNLDAWYRGRNVVTVSDHELFKSDHILLPLPTTLYPSYLFQKVEESKLKANTRYTVSGFIAHAEDLEIVVSRYGQEIKKVVQVPYGEAFPLTSSGPICCRPRSRVNGKPADPHFFSYSIDVGALDVEANPGIELGFRIVEPTGMARVSNLEIREDRPLTANEIRKVQRAARDWKQKYDQERAEVRALIQPVLNQINALYENEDWNGAIRSGVSYHDLEAIVLPTLPKLNHWFMSDMLGEQGSILAQFQEALNRAYTQLEGSTILHNGHFTTDAANWTIEGDAHQVVLEDGRRVLRLPDWSSSLSQTIEIENFDPDKEYQLVFHGQGEGTVTLEHGEEGEYVETHPHKFANFTTSQRQGITFESNKVTVTISSEDGEFLADNIAIVEVPMFNKNQMVNENRGVNINSNTNMNSSNNSNNQ

SEQ ID NO: 436 - protein, 1179 aa, Bacillus thuringiensis T13001
MVTVNEIYPSYYNVLASPYVFESNTDSIEKAVDDFRKGLAKGDVTKQVVNIIESIKDGKFNYQTVITSILSLASMVLPEIGFFMPIIGLFFSALSGGGPSIDIGSIFKAIQPAIQQMIDKSLTEDNIKDMDTQATVLQTQLKAYQTQLKAYTSITNPGTTDISDLHRVLDNTIEQLNSNLAFFQKEGYKDIGLPYYCLFATLYFTLLSDKIKNGVKWGYNSQAIPSFQTTFDTDLASHTQYVLNTYFENMPKSDDPARDARDDGDDGDAKFENKKAKYIRGMTLSCLDYVSLWPTFSPRDYSQEVDVEQTRTIVASPNISYFAHNIAPPPYHSPLSRIKIYNIVDPLYYGLPIIGAEKWDQSGGYETEGKLNGVQTPSVTFPQNDPVIQTLPCVAGPAESIIGVIGGYTFNLKSGNQLSLLPDHVLPMPCSLVGGLVGDEEDVKFPDNHKLNYMIDAKTSGYSVTVFENLVPENIIGQPVDTDNGNTVLQIKGFPAEKGRIGNPDQGELHYVYEPGNGAAAIDLKPYQILELPFYNYTNGDYHVRIRYASKSDIPAYFSVNTPNGSQARGPITLPNTETQASAVPGMSGKYAFNEGATVTIPVVKDKDYCTVNIQNNSQEALFIDRIEFVPKTNLCDNLHCDCNNPVDTDCQMCCICASLTDCDCNNPHGFDCAICCSLGISHPSFVTLTDLQNITTQVNALFASETKNMLAKEVNDHDIEEVVLKVDALSDEVFGTEKKALRKLVNQAKRLSKARNLLVGGSFENWDAWYKGQKVIRLSDHELLKGDHVFLPSPTLYPSYIFQKVEESKLKPNTRYTVSGFIAHAIGLEIVVSRYGQEIKKVVQVPYGEAFPLTPIGRICCQSYSTSNGKPVDPHFFSYSIDVGALDVEANPGIEFGLRIVERTGMARVSNLEIREDRSLTANELRIVQRAARDWKTTYDQERAEVTALIQPVLNQINGLYENGDWNGVIRSGISYHDVESIVLPTLPKLRHWFISDMLSAQGNIIARFQEVLNFAHRQLEENTLLHNGHFTTDAANWTVEGDAHQRTLEDGRRVLRFPDWSSSVSQTIEIENFDPNKEYQLVFHGQGEGTVTLEHGEETKYIETHTHHFANFTTSQRQGLTFESNKVTVTISSEDGEFLVDNIALVEVPMFNKNQMVNENRGININSNTNMNSSNNQ

SEQ ID NO: 437 - protein, 869 aa, Bacillus thuringiensis T13001
MKNLEKGLTGQDATKAIANALQLIFIDDTVNYQSYVNFALSLITIAVPEIGILTPFIGLFFAALNKNSATPPSATDIFQAMQPAIQAMIDKSLETEELKHLNDAAAELRGALSAYQDEMDTIQGLGGFDKVDQATKDLFWGKLIDVDTFFRVKVPVFIQPNPQFPDLVLISAPYYTMFASMHLIFLRDIIYHGQTWNAKKFTQGVNGVSGSLDAYKIDLKKLIKTYSKNIHDIFNQGLQRYGDSFNDTVQFRKKQQYIEIMTTHCLDFARLFPTFDPDLYPIGSSGINLQKTRRLLSPILPIREFDVVSIDTSKWPDYNNGLLPDPNKRVLKKVTLYPYYGSRWDPNRNILWAVEIEDSFGTQLYGTIPPDSSSIDTGDKGGAHPIPIDPSNPVVDIYMYSFHTNGEATIQFTMKDGTQYKVGWVGSLQRYEIPGAHYLSYLYEVDYTKDDDPKYGYGRIGRLVGVSTPQEAMGENYIGIPDEDGNLSGMGFAWENGDIDNGIGSLQVVKETITGTNVVKLNYQQIVRLPIQNKTKLSYNVRIHYASKNEIKGFFHIYTGSDDLLKGEVTFPSTETDDVQKMVAVQGDNGKYALHVFETPVTLPVGQFTAYIQNNSTEDFYLDRIEFVPVTSDDNLPDITIPFHANLSIQPGESQTIWKSPGSRVGISTDFTTHVLSNFVGFAQYYKSGEPLDRSSMGDLSDHVQKSISTGFDEIRIMNAGEVGTASIVGTVSGSIDLSSNNNPGNNPNDTVTIDTSFDVSRGDTQIIWTAPQSKLGVSTKFQLDLGIYSTIELHYLKSGVIQQPIGVYSDDDQDNLIQDSVPTGFDQIEVYNSYDFYNHFDNAEGSLKGTISFASNSSRNTFVFLKNK

SEQ ID NO: 438 - protein, 303 aa, Bacillus thuringiensis jegathesan
MEITDIVLKIYDFIEWDYVTNQDGIPYTLFDKAIYEYELNDTVTIPETKVFKTTPIPIASALTITENRSSQTQLHTIKFSEKKMESVTNTTVHGFKIGGAIKVGAKGTVTANFLVSGGTAEANVELSLTGEYNYSSTTANVNQTEKTWEITENVSVASHTSLTSQLIIMQADIRVPMILNSNLIGKRYYDDYANMFFSYIFQSKTSGRTEMISPASRLANQSWPGKPIVFKSGGSNGSLNLSGFGYSDLYKGLYAFIRYTETPLDRYSSPGKTWDSNLIHLRDGQILNVYDNRGIVKPVRLVE

SEQ ID NO: 439 - protein, 303 aa, Bacillus thuringiensis israelensis
MEITDIVLKIYDFIEWDYVTNQDGIPYTLFDKAIYEYELNDTVTIPETKVFQTTPIPIASALTITENRSSQTQLHTIKFSEKKMESVTNTTVHGFKIGGAIKVGAKGTVTANFLVSGGTAEANVELSLTGEYNYSSTTANVNQTEKTWEITENVSVASHTSLTSQLIIMQADIRVPMILNSNLIGKRYYDDYANMFFSYIFQSKTSGRTEMISPASRLANQSWPGKPIVFKSGGSNGSLNLSGFGYSDLYKGLYAFIRYTETPLDRYSSPGKTWDSNLIHLRDGQILNVYDNRGIVKPVRLVE

SEQ ID NO: 440 - protein, 303 aa, Bacillus thuringiensis IBL 4222; identical to SEQ ID NO: 439

SEQ ID NO: 441 - protein, 319 aa, Bacillus thuringiensis malayensis
MTITNIELAIRDYTNWDGTREIPGYINRQVIDGPNIYDYVISDSVAVPKTVIFNVNPTPYTGPNIISENNTDVNQNKRIKFSEKVVETTTHTTTKGFKIGGGIKSTTKGTLKLKFPVGELGFEQTPELPPTGEYNSSSTTGNTCANEKLWEITDNITVPPHSRVTSTLIIMKTEVRVPMELTTNLRGTNSSGEGSFPTSNGLFSYTTSARGTVGGIFVSYYVRPASALYNTSWPDKPATFNSIGSNESLNLLGSGYSDVVPSLYVTIRQDQTPLSGYPGETKTWYSDKVILRDGRIVTLPSNADVNMSQTAKIPYCDRS

SEQ ID NO: 442 - protein, 319 aa, Bacillus thuringiensis israelensis
MTITNIELAIRDYTNWDGTREIPGYINRQVIDGPNIYDYVISDSVAVPKTVIFNVNPTPYTGPNIISENNTDVNQNKRIKFSEKVVETTTHTTTKGFKIGGGIKSTTKGTLKLKFPVGELGFEQTLELPLTGEYNSSSTTGNTCANEKLWEITDNITVPPHSRVTSTLIIMKTEVRVPMELTTNLRGTNSSGEGSFPTSNGLFSYTTSARGTVGGIFVSYYVRPASALYNTSWPDKPATFNSIGSNESLNLLGSGYSDVVPSLYVTIRQDQTPLSGYPGETKTWYSDKVILRDGRIVTLPSNADVNMSQTAKIPYCDRS

SEQ ID NO: 443 - protein, 319 aa, Bacillus thuringiensis IBL 4222; identical to SEQ ID NO: 442

SEQ ID NO: 444 - protein, 1154 aa, Bacillus thuringiensis serovar tochigiensis BGSC 4Y1
MKEQEFKGMDVLSNAQKTETLPCDLNITGCSPNNFLNISEEIDANLVPYNAPSAITTSIEITSTLLSDLGVPGASTIGLLLGKLINLLWPGGENDKSVWTSLLNESEELVNQKIEDITVITNAETALRGMHRVLQSYRSALNSWINPKGERISPEAMRTTYISALTTLNNSMASFSVPKHELPLLTLYSQAANIYLYVAKDITIFGKEWGFTYRNPEREGDIEFYYNEFLKYTAEHSEYCIDWYNQGLNQLSQSNSRDWVKYNKYRREMTIMVLDIISLFSSYDGFLYPQKTKTELTRMIFTNPIVYEGKQQYTWHQLAPSFSEIEDSAVPKPDYFRVLRNLLIHTKSYGSGVSATNYWSSHDLTYSLTNTPIYHQVSFGNKSTNGDDKYNNFSLSGRDVYKIISIARQNGPSYTDFIVNQFEMQTLNTSNAKNVLSYNHPSEWSNRQTFDSTTELPVTTNPPTTYGDDKQYSHRLGFISEVQHSSSRPNLIPIYGWTHTSVNLDNRIYSDRITQIPAIKSSPDLGGNFQNIAKGPGFNGGYVTTARSVNALVDVLKLQVTLDQNSLAQKYRVRLRYASNKRVPATLFTNTSGDYKFELQPSEVAPNPPYTKYQSFRYIDIPGLVSFTSTTDVVTVYLDMRYAPVGSYVEVDRIEFIPSNEIAELEKSLEKMKQAVNALFAEGRNVLKLDVTDRQIDMLSNLIDCLPEDVEPSEKRNLLNAVRYAKRLSQSRNLFIDSDFKLFNTGNGWSGSQSISISEGNILFKGPYLRLLGSNDDGSIPTYLYQKIDESKLKAYTRYKVRGFIGESKDLELYIVRYDGNTHTVMNVPRPRISPSIVMDSCGIPDRCKTHIEFDVSDTLSTDGSSSDPHAFSYHIDIGDMDLNENLGIWVIFKISTPDGYATLGNIECVEEGPLVGGALAQIKKKEQKFKEKIIEIRANTQRIYTEAKQAINNLFTDPPQDTKLKLATSLVKILEADGIAQRIPEIYNQWLYNIQGMNYSLFQELNTRIYQALELYTLRNLVQNPRFLDELSNWNVTSNVSVQQISGIPVLVLSNWDAQVKQRIVLKEDCGYILRVTAKKEGVGAGNVNISDCVGNAETLIFTSCNDKSTNISFNYDTQSIEFFPDAEQVYIEITESEGTFYIQNIELFLMRE

SEQ ID NO: 445 - protein, 753 aa, Bacillus thuringiensis MO19
MSVVYYVKGGDIMDPFSNCSEKKYSDSNNNQELTVESSSFYSNTTNENMKKNYPPINKNFSRNSNDTVLDILNISQNNNIDIFAPYNNLHSIKDELQIRTVIPGGVIFSVTGNKFVDSKFTAITYAAITKLTSSLITAAATAILGPIGTTIGGAISGPIANALFGLIPGMKPLTPQEIIDIAVEQSKLYTDEQITNLVITNATSELASIKAKIEDFNSQLNFALNSKNDNLMNRIDFETFLVTLENDIYGSIIKLMNFGYSKQLLPIITVCCTLNLSFLRDAIFNSQTFNISTQGKRVLTDTFERRTIEYSDKIINEYTLLFNEIKLKENAKTTLDFRTFMSLQVLDQVDLWSVFKFSQFNIRNTRRLYTIPYQYSENDVSKLDPTQINGDWKFINQILYGLPGNRISGFAGTVELYQPNKIRRINKLKALYSNNETTGYVGKDANAMDSFDTHPIISQKPAIINYASHVIVNLPPSSVQNLTLLDTIGPIFPGKYVINQQLYPGLNSLLEYEKFAIPDHKGVNVAGLPNIDSSYTSSTIDNLRQNFITSKPILGSVTAFQKDIPNYEQVNNKEQIVHLCPTDTDQKLLGFNIPALEYSKDRIANFGFEETWMIIPSYSSSGDNLQFKGTTAGIKYYLKSAQNAYANYKIFIKIAYKPNNSGNKVQLNINMKDLTSSSIISATLNIQNTSLLKGTSEDNVKFITFEVPTNFPISNNTYELQLIFTNLQQNDDLRLNELILHPINNDFINILNA

SEQ ID NO: 446 - protein, 305 aa, Bacillus thuringiensis tohokuensis
MAIFDVEADLIDNNKWYAQKYYNANPSTFRNPIVYDMNVSDLDVVPITTEFSSTPQLTNSATQVVRNNTSKDQSQTVLFSEKSIETFSRSTTEGYKIGSSIKSTTSFKVKVGFLVSGEINQSIEVAITGEYNHSSTETTTTTNEKLWQVTQPVIIPPYTQVTATLQIFSGPFVVPAKTKATIQGKGTNNGAYNFASAITYTDNSGRVYTDRNRAQALYTDRNEWPGYKRIYVGGSSSTDPTGLLRLEGEARITAQVGLYAVTEFRESPLPGYAGVGSNRTYYAPNILLGDGSVIQFPEYQRYLQR

SEQ ID NO: 447 - protein, 1060 aa, Bacillus thuringiensis serovar pakistani str. T13001
MADNNLQYTPPLRLDAEEYVPWKDVDSDVIIDAVAGAEGALFNLLIPGSGKIVEWGVSKFLKWATGDTYKPPSLSQEITRVEGMIATLQQQMYNVISATKAEILQNVAGLFFSNVVSAVNDYHHYLERWLDNSDDSNRLAELKSSLDKAIDEAHKAVSASYYNQNAQYTFAYNVNAATFSLILMRDKYLNYTQWGYGDAAGAQNFYEGTFLYRLKDYTTNILTQYNAILKLVHDLAVNPYSEPYREVTNRNPLQVTTNPLYNGKSDQRSMYWPSAYYGGSDNMRKKCISPMASDPYKHFSDSRIENQWNDDQHRSCQTPLPNGGLEMQINMPDQLKLSFQWNAYNRTRNVLTQTGLDFIAIWPYFDPIQYPPGEVTADLTRMLYSDLAGAITKNDIQSVDDIDNHVKKQSDLFEFLKSSKLYTKNVKVQTQQGPPFAYDSSTVKTHVDGDIIVGIENTTERTLETNTRNPGGIQGSSSDNADTIDPTEASKSVSISQWLFPRIFNFNGKVIGSVNETTPGNVTGIYNNLTYDFTLPEHQISWLSYVQAQENVLRPTNGYDYLTGNLTAANQGQIGALAIGWTKANIDANNTVKKGTITSIPAVKSHSITDWGTGTVVKGPGHTGGDLVKLPPNTRAKMIVTIEDTSTSYDVRIRYAAPSGGHIQFSYWNGGSDVKVADTQLQNTGGNTNFEHFQYAMLTTDNAKFKAPFSPVEILIENIGDSDVYLDKVEFSVLGQLPPGATPLTSQYMNPYGYNILWQSKNGEAANQGMVTFSQNDSAIKTFYLYNTEVVHQTTGSPSRWNGKFDTLYVQSPTSINLTQGFIVIDTTKNNPEPPIALPNQDILRPFTNEHEIWNGRYSTKALNLSLSTSSGAEGKIKFYNNTNLVHESPALSGSPSEPYTWEGSFNRITVYQSNSSDSNYFNLFGGFLKLDPNSNDNGNNGGPHNDCENIAHPDQPLYYESNNLIWTAAPNKLAYSTTEMQFVLSGGLGFTPGDIGAKIKLNFWKNDSIQYVAYGAVANLDFISAPAQSIPGGFDKITMDNDEYSFSTSLRMTLGSVCY

SEQ ID NO: 448 - protein, 781 aa, Bacillus thuringiensis serovar andalousiensis BGSC 4AW1
MKNGGLQMSRNDSNNDLPMSVLSRSQSKYLMTNMPLSELIHLSEQEWLDMYRKWKPMSTLDIDAEIGVTAALGIISFILSVSNPVSAAAVGIASILVPILWPTPAASPDPDIVWKSMIKNVENLIDEKIAQLHYDLAFAKLNGLKAGMVEFNQAIENLNQNPSSSGLKEAVRTKYRSLDSLFTYSMPQFAVNTAEIQLLPVYVEAATLHLLHKRTGFNFGKSWDLDPIEVESLYNDLIRLTGTYTDHCIRWYNRGLENLNPSTNTINYKPANMRDCNKYPWVKYDQSEWYYVNPSPNMCTTALSENSCKESMNVYNTEATPRWYGYRASQGEYQGLENWNSYNAFRRNLTTLVLDIIAVWPTFDPKLYKYGIKAELTRKLYSDICGTTYRSDPSQNSVNAIESKIVSPPSFFEWLDQIDFHTIVRDQGPNVGDFTSGELLTGVQQTVRRTLANPSLKPLEGKAGEQPTKIVRLTPNTFDITEVSTKQWFEPREIVLKRAGTNILTVGTITDERPYWSSLDRGLIYPKVKIYDQTQKNNQIPKTADPNKPQSEWDYSHRLSWFWYYPIREDAPMTYPNDKQIGAMACVWTHMSVDPTNSIAPDKITQIPAVKGNGMYFGGEIIKGLDNTGGDLVKLYSTSDRNQLQVDLKIPARMNNISGYQIRIRYASKQSGDIYLELERSVNSQWRLSTIPPTYSGNNLTSNSFGYHDALVIASQENAHPATLRIRNNDSPSLNTEIIIDKIEFIPIEGSLEEYEAKQKLEKAREVVNILFDSGANFEKA

SEQ ID NO: 449 - protein, 1078 aa, Bacillus thuringiensis serovar tochigiensis BGSC 4Y1
MSDKKGDKCMKQKRNAMKNKINAQSSPWFPANHKNKVEILQKGMNGVFDKKLGLNISPFPKVLTTCMQIVLKSIQFKSTLDIQIKEIFNCLWPMNADSQFIWQLCIAHLESLIQFDMPKSLKHNIFKRLQNIENEMKVYEKSFDEWQRTSNENVKKQELKKIIFNIESFLEECIRFFAMEKYELLLLVIYAQIANLHLLILRISLIYGEELDLTQEEQSVYQNKLISKIKLYTNYCTHQYKRGLFRIKKMQDYSCNSIEKWNLFNAYQKDMTLMVLDIISIWPTYDYSRYPMKTKIELTREIWTDIQYVSIENDKANLNKEVDFTLCTEPQIFEWLSTLEFYMRNSSNTSEFMGNIVGIHYSSYKTHHRKQHISRWWGEKSKYDYKLTVQNLQEYPVYNSIAQNSYESNQKVIKYIEKESQLLYHRLSRISGVIECPDKTNVSAITFAWAHVSVQETHDIDNKKLIIQIPASKAWSDETGKLRVIDGISTGGPLVLLEDTPLTISLNSKILHHLRIRYACNNNGVLRISKKPKLGSLSECIAEQAYKTTYEGSERDLVFESFDYLDFDFLLGETTSPYLIILERIQGTSPLIIDKIECIPVCITKRQHENNQYIKEAQKAVNQLFTNSLKNKLKFETTDYNVDQTAKKVESIYDSISLKEKVSLLRDVKHAKRLSKYRNLISNEDFGLPELISKNSWQFTHHVRVSCSDPQFKGYFLEIPSVKNVSLNEKDLFRNVYQKIDESKLKPYTRYIVRGFIGHCEDLEIWVTRYEKEVMSLQNVNNIVNNNGSVSHDTSHYFKVHIDVGNLDIEENLGIWVAFQITSPNGSATLGNIELIEMMPLSGKLLTQIKNTEEEWKKEKERRQLESNKSIQIANKAVKGLFDSSQEKKLNIVTSKKDILDALEKVENITYVYHSYLHNVVGNNFNVYKQLQERINRAFDLYQSRNKIMNGDFSRKDLGWNITPGIEFLKEEYRYFSLFIKHWSSSAVQEIELKSTCEYLLRVTGTKKAAGTGYVVCSGCASEYIQALFFTASEGERITKTIEVFPKTNRVQIEISTTNGTFLVESIELICLEDEKID

SEQ ID NO: 450 - protein, 475 aa, Bacillus thuringiensis PS52A1
MIIDSKTTLPRHSLIHTIKLNSNKKYGPGDMTNGNQFIISKQEWATIGAYIQTGLGLPVNEQQLRTHVNLSQDISIPSDFSQLYDVYCSDKTSAEWWNKNLYPLIIKSANDIASYGFKVAGDPSIKKDGYFKKLQDELDNIVDNNSDDDAIAKAIKDFKARCGILIKEAKQYEEAAKNIVTSLDQFLHGDQKKLEGVINIQKRLKEVQTALNQAHGESSPAHKELLEKVKNLKTTLERTIKAEQDLEKKVEYSFLLGPLLGFVVYEILENTAVQHIKNQIDEIKKQLDSAQHDLDRDVKIIGMLNSINTDIDNLYSQGQEAIKVFQKLQGIWATIGAQIENLRTTSLQEVQDSDDADEIQIELEDASDAWLVVAQEARDFTLNAYSTNSRQNLPINVISDSCNCSTTNMTSNQYSNPTTNMTSNQYMISHEYTSLPNNFMLSRNSNLEYKCPENNFMIYWYNNSDWYNNSDWYNN

SEQ ID NO: 451 - protein, 475 aa, Bacillus thuringiensis YBT-1518; identical to SEQ ID NO: 450

SEQ ID NO: 452 - protein, 475 aa, Bacillus thuringiensis 96418
MIIDSKTTLPRHSLIHTIKLNSNKKYGPGDMTNGNQFIISKQEWATIGAYIQTGLGLPVNEQQLRTHVNLSQDISIPSDFSQLYDVYCSDKTSAEWWNKNLYPLIIKSANDIASYGFKVAGDPSIKKDGYFKKLQDELDNIVDNNSDDDAIAKAIKDFKARCGILIKEAKQYEEAAKNIVTSLDQFLHGDQKKLEGVINIQKRLKEVQTALNQAHGESSPAHKELLEKVKNLKTTLERTIKAEQDLEKKVEYSFLLGPLLGFVVYEILENTAVQHIKNQIDEIKKQLDSAQHDLDRDVKIIGMLNSINTDIDNLYSQGQEAIKVFQKLQGIWATIGAQIENLRTTSLQEVQDSDDADEIQIELEDASDAWLVVAQEARDFTLNAYSTNSRQNLPINVISDSCNCSTTNMTSNQYSNPTTNMTSNQYMISHEYTSLPNNFMLSRNSNLEYKCPESNFMIYWYNNSDWYNNSDWYNN

SEQ ID NO: 453 - protein, 395 aa, Bacillus thuringiensis PS69D1
MILGNGKTLPKHIRLAHIFATQNSSAKKDNPLGPEGMVTKDGFIISKEEWAFVQAYVTTGTGLPINDDEMRRHVGLPSRIQIPDDFNQLYKVYNEDKHLCSWWNGFLFPLVLKTANDISAYGFKCAGKGATKGYYEVMQDDVENISDNGYDKVAQEKAHKDLQARCKILIKEADQYKAAADDVSKHLNTFLKGGQDSDGNDVIGVEAVQVQLAQVKDNLDGLYGDKSPRHEELLKKVDDLKKELEAAIKAENELEKKVKMSFALGPLLGFVVYEILELTAVKSIHKKVEALQAELDTANDELDRDVKILGMMNSIDTDIDNMLEQGEQALVVFRKIAGIWSVISLNIGNLRETSLKEIEEENDDDALYIELGDAAGQWKEIAEEAQSFVLNAYTP

SEQ ID NO: 454 - protein, 808 aa, Bacillus thuringiensis MC28
MTKKHKKILSMTLATGVFAGTYIPTAYTAFAETEPKEDLNEKKTKNINQNNPSIDLKGWFENPYKGVTFDQFINAFNNNAWNPLLVDIKNNGNAGSGTLVFLKGMMGTGLSLLPPPASLLGSIWTIFMPSTNGGTDMWRQLETYIDEKIDSKINDYHKYLMGAEFNGAMSAIKEYQRVLQIYNDSKNSLKRVEAPGTGVITAARNADTALKAFISIIQTPEKETDSVYQQITAPIFVQAANAHLLLQRDMILYGEEWGMDKNQWQGYKDNQKKLIQEYTNYAMKVYNDGLEKKKKEAENINTQQPNRNTDKWNHINAYVREYTLSVLDFVDLFPATNPETYSKGIMQENSRQIYSSIKGAVIPQGGTGEGTTWENIQKILDSQEYKGDLHKLDIRSYDRIDAIQPWYSDKKNGGANWTTPGWTGNTNGGNLNPLINPLNNPITRVKAQSSRTPNYIDFKFDTGGNNPSFGRYVSGHASYKEDIFEYPNQKLSQVHAFNTSTYPGFQGIDAVVFGFVDKNLTQSSTYLMTNMITAIPAAKYNRGMSNFQPQVESIHAKQKAMKTDTTNSYLAYGVEVSKEQEYKIRYKVAANENSKISLSHRKPGGNYAKIDDTTIPITRNFADTVKGEYGSYKIVEGPTVKLTKGTHDLKLENSQGKFSVDQIELEPVEQDQVIAQDNFDDKRLSWVNLGGIVNGGVTGKAGMIDANGNTWSYIQDQVLPFSKYTLSIKVKLNSNNGNERQKVTLYTDNLKHERITKTVELKGNAGYQEIQLEFITRKDSANTHVGILTSNGASNILFDDVKVIGAKK

SEQ ID NO: 455 - protein, 815 aa, Bacillus cereus AH603
MGTGDFMTKKQKKILSITLATGVFAGTYIPTAYTAFAENEKKEDLQENQTKNINQNSLPIDSYGWFENPYKGVTFSQFIDAFNNNQWQPLLVNIKNKGDAGSGTISFLKGMMTTGLSLLPPPASLLASIWSVFIPTNDANGTDMWRQLEIYIDEKIDSKINDYHKYLMGAEFNGAMSAIKEYQRVLQIYNDSKNSLKRVEEPGTPVIEAVRAADRKLKEFIAVVQTPEKSNDSVYQQITAPIFVQAANAHLLLQRDMILYGEEWGMDKDQWQGYKDNQKKLIQEYTNYAMKVYNDGLEKRKKEAEEINTQQPNRNTDRWNHINDYVREYTLSVLDFVDLFPATNPETYSKGVMQENSRQIYSSIKGAVIPQGGTGEGTTWENIQKILDSQEYKGDLHKLDIRSFDRIDAIQPWFSDKQNGGSNWTTPGWTGNASGGALKNLINPSDNPITRVKAQSSRTPNYIDFKFDTGGDNPYFGRYFSGGSYKEDIFEYPNQKLSQIHAFNRSTYPGFEGIDAVVFGFVDKNLTQSSTYLMTNMITTIPAAKYNRGMSNFQPQVESIHAKQKAMKTDTTNSYLAYGVEISKEQEYKIRYKVAANENSKISLSHRKPGGNYAKIDDTTIPITGNAADTVKGEYGSYKIVEGPIVKLTKGAHDLKLENSQGKFSLDQIELEPVERDQVIARDNFDDQRLNWINLGGIVNGGITGKAGMIGTNGDTWTYIQDQVLPFSKYTLSIKVKLDSSDGNERQKVTIFTDNLKHERITKTVELKGKAGYQEMQLEFITSRDLANTHVGILTSNGTSNVLFDDVQVIGAKKS

SEQ ID NO: 456 - protein, 1138 aa, Bacillus thuringiensis galleriae PGSI245
MNLNNLDGYEDSNRTLNNSLNYPTQKALSPSLKNMNYQDFLSITEREQPEALASGNTAINTVVSVTGATLSALGVPGASFITNFYLKIAGLLWPENGKIWDEFMTEVEALIDQKIEEYVRNKAIAELDGLGSALDKYQKALADWLGKQDDPEAILSVATEFRIIDSLFEFSMPSFKVTGYEIPLLTVYAQAANLHLALLRDSTLYGDKWGFTQNNIEENYNRQKKRISEYSDHCTKWYNSGLSRLNGSTYEQWINYNRFRREMILMALDLVAVFPFHDPRRYSMETSTQLTREVYTDPVSLSISNPDIGPSFSQMENTAIRTPHLVDYLDELYIYTSKYKAFSHEIQPDLFYWSAHKVSFKKSEQSNLYTTGIYGKTSGYISSGAYSFHGNDIYRTLAAPSVVVYPYTQNYGVEQVEFYGVKGHVHYRGDNKYDLTYDSIDQLPPDGEPIHEKYTHRLCHATAIFKSTPDYDNATIPIFSWTHRSAEYYNRIYPNKITKIPAVKMYKLDDPSTVVKGPGFTGGDLVKRGSTGYIGDIKATVNSPLSQKYRVRVRYATNVSGQFNVYINDKITLQTKFQNTVETIGEGKDLTYGSFGYIEYSTTIQFPDEHPKITLHLSDLSNNSSFYVDSIEFIPVDVNYAEKEKLEKAQKAVNTLFTEGRNALQKDVTDYKVDQVSILVDCISGDLYPNEKRELQNLVKYAKRLSYSRNLLLDPTFDSINSSEENGWYGSNGIVIGNGDFVFKGNYLIFSGTNDTQYPTYLYQKIDESKLKEYTRYKLKGFIESSQDLEAYVIRYDAKHRTLDVSDNLLPDILPENTCGEPNRCAAQQYLDENPSPECSSMQDGILSDSHSFSLNIDTGSINHNENLGIWVLFKISTLEGYAKFGNLEVIEDGPVIGEALARVKRQETKWRNKLAQLTTETQAIYTRAKQALDNLFANAQDSHLKRDVTFAEIAAARKIVQSIREAYMSWLSVVPGVNHPIFTELSGRVQRAFQLYDVRNVVRNGRFLNGLSDWIVTSDVKVQEENGNNVLVLNNWDAQVLQNVKLYQDRGYILHVTARKIGIGEGYITITDEEGHTDQLRFTACEEIDASNAFISGYITKELEFFPDTEKVHIEIGETEGIFLVESIELFLMEELC

SEQ ID NO: 457 - protein, 1138 aa, Bacillus thuringiensis dakota HD511
MNLNNLGGYEDSNRTLNNSLNYPTQKALSPSLKNMNYQDFLSITEREQPEALASGNTAINTVVSVTGATLSALGVPGASFITNFYLKITGLLWPHNKNIWDEFMTEVETLIEQKIEQYARNKALAELEGLGNNLTIYQQALEDWLNNPDDPATITRVIDRFRILDALFESYMPSFRVAGYEIPLLTVYAQAANLHLALLRDSTLYGDKWGFTQNNIEENYNRQKKHISEYSNHCVKWYNSGLSRLNGSTYEQWINYNRFRREMILMVLDIAAVFPIYDPRMYSMETSTQLTREVYTDPISLSISNPDIGPSFSQMENTAFRTPHLVDYLDELYIYTSKYKAFSHEIQPDLFYWCVHKVSFKKSEQSNLYTTGIYGKTSGYISSGAYSFRGNDIYRTLAAPSVVVYPYTQNYGVEQVEFYGVKGHVHYRGDNKYDLTYDSIDQLPPDGEPIHEKYTHRLCHATAISKSTPDYDNATIPIFSWTHRSAEYYNRIYPNKIKKIPAVKMYKLDDLSTVVKGPGFTGGDLVKRGSNGYIGDIKATVNSPLSQKYRVRVRYATSVSGLFNVFINDEIALQKNFQSTVETIGEGKDLTYGSFGYIEYSTTIQFPNEHPKITLHLNHLSNNSPFYVDSIEFIPVDVNYDEKEKLEKAQKAVNTLFTEGRNALQKYVTDYKVDQVSILVDCISGDLYPNEKRELQNLVKYAKRLSYSRNLLLDPTFDSINSSEENGWYGSNGIVIGNGDFVFKGNYLIFSGTNDTQYPTYLYQKIDESKLKEYSRYKLKGFIESSQDLEAYVIRYDAKHRTLDVSDNLLPDILPENTCGEPNRCAAQQYLDENPSSECSSMQDGILSDSHSFSLNIDTGSINHNENLGIWVLFKISTLEGYAKFGNLEVIEDGPVIGEALARVKRQETKWRNKLAQMTTETQAIYTRAKQALDNLFANAQDSHLKIDVTFAEIAAARKIVQSIREVYMSWLSVVPGVNHPIFTELSGRVQRAFQLYDVRNVVRNGRFLNGLSDWIVTSDVNVQEENGNNVLVLNNWDAQVLRNVKLYQDRGYVLRVTARKIGIGEGYITITDEEGHTDQLRFTACEEIDASNAFISGYITKELEFFPDTEKVHIEIGETEGIFLVESIELFLMEELC

SEQ ID NO: 458 - protein, 1138 aa, Bacillus thuringiensis kumamotoensis 867
MNLNNLGGYEDSNRTLNNSLNYPTQKALSPSLKNMNYQDFLSITEREQPEALASGNTAINTVVSVTGATLSALGVPGASFITNFYLKITGLLWPHDKNIWDEFMTEVETLIEQKIEQYARNKALAELEGLGNNLTIYQQALEDWLNNPDDPATITRVIDRFRILDALFESYMPSFRVAGYEIPLLTVYAQAANLHLALLRDSTLYGDKWEFTQNNIEENYNRQKKHISEYSNHCVKWYNSGLSRLNGSTYEQWINYNRFRREMILMVLDIAAVFPIYDPRMYSMETSTQLTREVYTDPISLSISNPGIGPSFSQMENTAIRTPHLVDYLDELYIYTSKYKAFSHEIQPDLFYWSAHKVSFKQSEQSNLYTTGIYGKTSGYISSGAYSFRGNDIYRTLAAPSVVVYPYTQNYGVEQVEFYGVKGHVHYRGDNKYDLTYDSIDQLPPDGEPIHEKYTHRLCHATAISKSTPDYDNATIPIFSWTHRSAEYYNRIYPNKITKIPAVKMYKLGDTSTVVKGPGFTGGDLVKRGSNGYIGDIKATVNSPLSQNYRVRVRYATNVSGQFNVYINDKITLQRKFQNTVETIGEGKDLTYGSFGYIEYSTTIQFPDKHPKITLHLSDLSNNSSFYVDSIEFIPVDVNYDEKEKLEKAQKAVNTLFTEGRNALQKDVTDYKVDQVSILVDCISGDLYPNEKRELQNLVKYAKRLSYSRNLLLDPTFDSINSSEENGWYGSNGIVIGNGDFVFKGNYLIFSGTNDTQYPTYLYQKIDESKLKEYTRYKLKGFIESSQDLEAYVIRYDAKHRTLDVSDNLLPDILPENTCGEPNRCAAQQYLDENPSSECSSMQDGILSDSHSFSLNIDIGSINHNENLGIWVLFKISTLEGYAKFGNLEVIEDGPVIGEALARVKRQETKWRNKLAQLTTETQAIYTRAKQALDNLFANAQDSHLKIDVTFAEIAAARKIVQSIREAYMSWLSVVPGVNHPIFTELSERVQRAFQLYDVRNVVRNGRFLNGLSDWIVTSDVKVQEENGNNVLVLNNWDAQVLQNVKLYQDRGYILRVTARKIGIGEGYITITDEEGHTVQLRFTACEVIDASNAFISGYITKELEFFPDTEKVHIEIGETEGIFLVESIELFLMEELC

SEQ ID NO: 459 - protein, 1138 aa, Bacillus thuringiensis WZ-9
MNLNNLGGYEDSNRTLNNSLNYPTQKALSPSLKNMNYQDFLSITEREQPEALASGNTAINTVVSVTGATLSALGVPGASFITNFYLKITGLLWPHDKNIWDEFMTEVETLIEQKIEQYARNKALAELEGLGNNLTIYQQALEDWLNNPDDPATITRVIDRFRILDALFESYMPSFRVAGYEIPLLTVYAQAANLHLALLRDSTLYGDKWGFTQNNIEENYNRQKKHISEYSNHCVKWYNSGLSRLNGSTYEQWINYNRFRREMILMVLDIAAVFPIYDPRMYSMETSTQLTREVYTDPISLSISNPDIGPSFSQMENTAIRTPHLVDYLDELYIYTSKYKAFSHEIQPDLFYWSAHKVSFKQSEQSNLYTTGIYGKTSGYISSGAYSFRGNDIYRTLAAPSVVVYPYTQNYGVEQVEFYGVKGHVHYRGDNKYDLTYDSIDQLPPDGEPIHEKYTHRLCHATAISKSTPDYDNATIPIFSWTHRSAEYYNRIYPNKITKIPAVKMYKLGDTSTVVKGPGFTGGDLVKRGSNGYIGDIKATVNSPLSQNYRVRVRYATNVSGQFNVYINDKITLQRKFQNTVETIGEGKDLTYGSFGYMEYSTTIQFPDEHPKITLHLSDLSNNSSFYVDSIEFIPVDVNYDEKEKLEKAQKAVNTLFTEGRNALQKDVTDYKVDQVSILVDCISGDLYPNEKRELQNLVKYAKRLSYSRNLLLDPTFDSINSSEENGWYGSNGIVIGNGDFVFKGNYLIFSGTNDTQYPTYLYQKIDESKLKEYTRYKLKGFIESSQDLEAYVIRYDAKHRTLDVSDNLLPDILPENTCGEPNRCAAQQYLDENPSSECSSMQDGILSDSHSFSLNIDIGSINHNENLGIWVLFKISTLEGYAKFGNLEVIEDGPVIGEALARVKRQETKWRNKLAQLTTETQAIYTRAKQALDNLFANAQDSHLKIDVTFAEIAAARKIVQSIREAYMSWLSVVPGVNHPIFTELSERVQRAFQLYDVRNVVRNGRFLNGLSDWIVTSDVKVQEENGNNVLVLNNWDAQVLQNVKLYQDRGYILRVTARKIGIGEGYITITDEEGHTVQLRFTACEVIDASNAFISGYITKELEFFPDTEKVHIEIGETEGIFLVESIELFLMEELC

SEQ ID NO: 460 - protein, 1138 aa, Bacillus thuringiensis HQ122
MNLNNLDGYEDSNRTLNNSLNYPTQKALSPSLKNMNYQDFLSITEREQPEALASGNTAINTVVSVTGATLSALGVPGASFITNFYLKITGLLWPHDKNIWDEFMTEVETLIEQKIEQYARNKALAELEGLGNNLTIYQQALEDWLNNPDDPATITRVIDRFRILDALFESYMPSFRVAGYEIPLLTVYAQAANLHLALLRDSTLYGDKWGFTQNNIEENYNRQKKHISEYSNHCVKWYNSGLSRLHGSTYEQWINYNRFRREMILMVLDIAAVFPIYDPRMYSMETSTQLTREVYTDPISLSISNPDIGPSFSQMENTAIRTPHLVDYLDKLYIYTSKYKAFSHEIQPDLFYWSAHKVSFKQSEQSNLYTTGIYGKTSGYISSGEYSFRGNDIYRTLAAPSVVVYPYTQNYGVEQVEFYGVKGHVHYRGDNKYDLTYDSIDQLPPDGEPIHEKYTHRLCHATAISKSTPDYDNATIPIFSWTHRSAEYYNRIYPNKITKIPAVKMYKLDDLSTVVKGPGFTGGDLVKRGSNGYIGDIKATVNSPLSQKYRVRVRYATSVSGLFNVFINDEIALQRNFQSTVETIGEGKDLTYGSFGYIEYSTTIQFPNEHPKITLHLNHLSNNSPFYVDSIEFIPVDVNYDEKEKLEKAQKAVNTLFTEGRNALQKDVTDYKVDQVSILVDCISGDLYPNEKRELQNLVKYAKRLSYSRNLLLDPTFDSINSSEENGWYGSNGIVIGNGDFVFKGNYLIFSGTNDTQYPTYLYQKIDESKLKEYTRYKLKGFIESSQDLEAYVIRYDAKHRTLDVSDNLLPDILPENTCGEPNRCAAQQYLDENPSSECSSMQDGILSDSHSFSLNIDTGSTNHNENLGIWVLFKISTLEGYAKFGNLEVIEDGPVIGEALARVKRQETKWRNKLAQMTTETQAIYTRAKQALDNLFANAQDSHLKIDVTFAEIAAARKIVQSIREAYMSWLSVVPGVNHPIFTELSGRVQRAFQLYDVRNVVRNGRFLNGLSDWIVTSDVNVQEENGNNVLVLNNWDAQVLQNVKLYQDRGYILRVTARKIGIGEGYITITDEEGHTDQLRFTACEEIDASNAFISGYITKELEFFPDTEKVHIEIGETEGIFLVESIELFLMEELC

SEQ ID NO: 461 - protein, 1145 aa, Bacillus thuringiensis monterrey GM-33
MNLNNLGGYEDSNRTLNNSLNYPTQKALSPSLKNMNYQDFLSITEREQPEALASGNTAINTVVSVTGATLSALGVPGASFITNFYLKITGLLWPHDKNIWDEFMTEVETLIEQKIEQYARNKALAELEGLGNNLTIYQQALEDWLNNPDDPATIHDVIDRFRILDALFESYMPSFRVAGYEIPLLTVYAQAANLHLALLRDSTLYGDKWGFTQNNIEENYNRQKKHISEYSNHCVKWYNSGLSRLHGSTYEQWINYNRFRREMILMVLDIAAVFPIYDPRMYSMETSTQLTREVYTDPISLSISNPDIGPSFSQMENTAIRTPHLVDYLDKLYIYTSKYKAFSHEIQPDLFYWSAHKVSFKQSEQSNLYTTGIYGKTSGYISSGEYSFRGNDIYRTLAAPSVVVYPYTQNYGVEQVEFYGVKGHVHYRGDNKYDLTYDSIDQLPPDGESIHEKYTHRLCHATAISKSTPDYDNATIPIFSWTHRSAEYYNRIYPNKITKIPAVKMYKLDDLSTVVKGPGFTGGDLVKRGSNGYIGDIKATVNSPLSQKYRVRVRYATSVSGLFNVFINDEIALQRNFQSTVETIGEGKRFNLWFIWIYREYSTTIQYIRIEHPERITRSFKTHLSNNSPCYCRSIEFIPVDVNYAEKEKLEKAQKAVNALFTEGRNALQKHVTDYKVDQVSILVDCISGDLYPNEKRELQNLVKYAKRLSYSRNLLLDPTFDCINSSEENGWYGSNGIVIGNGDFVFKGNYLIFSGTNDTQYPTYLYQKIDESKLKEYTRYKLKGFIESSQDLEAYVIRYDAKHRTLDVSDNLLPDILPENTCGEPNRCAAQQYLDENPSSECSSMQDGILSDSHSSSLNIDTGSINHNENLGIWVWFKIPTLEGYAKFGNLEVDEDGPVIGEALARVKRQETKWRNKLAQMTTETQAIYTRAKQALEYLFANAQDSHLKRNVTFAEIAAARKIVQSIREAYMSWLSVVPGVNHPIFTELSGRVQRAFQLYDVRNVVRNGRFLNGLSDWIVTSDVKVQEENGNNVLVLNNWDAQVLQNVKLYQDRGYILHVTARKIGIGEGYITITDEEGHTDQLRFTACEEIDASNAFISGYITKELEFFPDTEKVHIEIGGTEGIFLVEGILEVFLRLESYVI

SEQ ID NO: 462 - protein, 1138 aa, Bacillus thuringiensis HQ122
MNLNNLGGYEDSNRTLNNSLNYPTQKALSPSLKNMNYQDFLSITEREQPEALASGNTAINTVVSVTGATLSALGVPGASFITNFYLKITGLLWPHNKNIWDEFMTEVETLIEQKIEQYARNKALAELEGLGNNLTIYQQALEDWLNNPDDPATITRVIDRFRILDALFESYMPSFRVAGYEIPLLTVYAQAANLHLALLRDSTLYGDKWGFTQNNIEENYNRQKKHISEYSNHCVKWYNSGLSRLNGSTYEQWINYNRFRREMILMVLDIAAVFPIYDPRMYSMETSTQLTREVYTDPISLSISNPDIGPSFSQMENTAIRTPHLVDYLDELYIYTSKYKAFSHEIQPDLFYWSAHKVSFKKSEQSNLYTTGIYGKTSGYISSGAYSFRGNDIYRTLAAPSVVVYPYTQNYGVEQVEFYGVKGHVHYRGDNKYDLTYDSIDQLPPDGEPIHEKYTHRLCHATAISKSTPDYDNATIPIFSWTHRSAEYYNRIYPNKITKIPAVKMYKLDDLSTVVKGPGFTGGDLVKRGSNGYIGDIKATVNSPLSQKYRVRVRYATSVFGLFNVFINDEIALQKNFQSTVETIGEGKDLTYGSFGYIEYSTTIQFPNEHPKITFHLNHLSNNSPFYVDSIEFIPVDVNYDEKEKLEKAQKAVNTLFTEGRNALQKYVTDYKVDQVSILVDCISGDLYPNEKRELQNLVKYAKRLSYSRNLLLDPTFDSINSSEENGWYGSNGIVIGNGDFVFKGNYLIFSGTNDTQYPTYLYQKIDESKLKEYTRYKLKGFIESSQDLEAYVIRYDAKHRTLDVSDNLLPDILPENTCGEPNRCAAQQYLDENPSSECSSMQDGILSDSHSFSLNIDTGSINHNENLGIWVLFKISTLEGYAKFGNLEVIEDGPVIGEALARVKRQETKWRNKLAQMTTETQAIYTRAKQALDNLFANAQDSHLKIDVTFAEIAAARKIVQSIREAYMSWLSVVPGVNHPIFTELSGRVQRAFQLYDVRNVVRNGRFLNGLSDWIVTSDVNVQEENGNNVLVLNNWDAQVLQNVKLYQDRGYILRVTARKIGIGEGYITITDEEGHTDQLRFTACEEIDASNAFISGYITKELEFFPDTEKVHIEIGETEGIFLVESIELFLMEELC

SEQ ID NO: 463 - protein, 1138 aa, Bacillus thuringiensis GW6; identical to SEQ ID NO: 459

SEQ ID NO: 464 - protein, 1138 aa, Bacillus thuringiensis; identical to SEQ ID NO: 459

SEQ ID NO: 465 - protein, 1138 aa, Bacillus thuringiensis QG-121
MNLNNLGGYEDSNRTLNNSLNYPTQKALSPSLKNMNYQDFLSITEREQPEALASGNTAINTVVSVTGATLSALGVPGASFITNFYLKITGLLWPHDKNIWHEFMTEVETLIEQKIEQYARNKALAELEGLGNNLTIYQQALEDWLNNPDDPATITRVIDRFRILDALFESYMPSFRVAGYEIPLLTVYAQAANLHLALLRDSTLYGDKWEFTQNNIEENYNRQKKHISEYSNHCVKWYNSGLSRLNGSTYEQWINYNRFRREMILMVLDIAAVFPIYDPRMYSMETSTQLTREVYTDPISLSISNPGIGPSFSQMENTAIRTPHLVDYLDELYIYTSKYKAFSHEIQPDLFYWSAHKVSFKQSEQSNLYTTGIYGKTSGYISSGAYSFRGNDIYRTLAAPSVVVYPYTQNYGVEQVEFYGVKGHVHYRGDNKYDLTYDSIDQLPPDGESIHEKYTHRLCHATAISKSTPDYDNATIPIFSWTHRSAEYYNRIYPNKITKIPAVKMYKLGDTSTVVKGPGFTGGDLVKRGSNGYIGDIKATVNSPLSQNYRVRVRYATSVFGLFNVFINDEIALQKNFQSTVETIGEGKDLTYGSFGYIEYSTTIQFPNEHPKITFHLNHLSNNSPFYVDSIEFIPVDVNYDVNYAEKEKLEKAQKAVNALFTEGRNALQKHVTDYKVDQVSILVDCISGDLYPNEKRELQNLVKYAKRLSYSRNLLLDPTFDCINSSEENGWYGSNGIVIGNGDFVFKGNYLIFSGTNDTYLYQKIDESKLKEYTRYKLKGFIESSQDLEAYVIRYDAKHRTLDVSDNLLPDILPENTCGEPNRCAAQQYLDENPSSECSSMQDGILSDSHSFSLNIDTGSINHNENLGIWVLFKISTLEGYAKFGNLEVIEDGPVIGEALARVKRQETKWRNKLAQMTTETQAIYTRAKQALDNLFANAQDSHLKIDVTFAEIAAARKIVQSIREAYMSWLSVVPGVNHPIFTELSGRVQRAFQLYDVRNVVRNGRFLNGLSDWIVTSDVNVQEENGNNVLVLNNWDAQVLQNVKLYQDRGYILRVTARKIGIGEGYITITDEEGHTDQLRFTACEEIDASNAFISGYITKELEFFPDTEKVHIEIGETEGIFLVESIELFLMEELC

SEQ ID NO: 466 - protein, 1154 aa, Bacillus thuringiensis huazhongensis
MDIRNQNKYEVVYPAINETTSNTTSKYPLASDPIKQYQNMNYKDSLNIIEGNNVITPVSGTAVLATARKIGGKIVKAIGEQILSKILKEILDYLWPSSSSSNSWEEMMKEVEYLIDKKIEEYARNKALAVLEGIGNAVESYYSALEAWELESSERSLELVLERYQFAVQFARSSMPSFAIINYEIPLLATYANAANVHLLLMRDIQIYGDRWGISQNDMNLFLKEQEIYTSEYSEHCVKWYNEGLNQLKTKGGASGLVWENYNSFRTEMTIMVLDLVAIFPAYNMSKYPIESTVELTRTIYTDPLGYTGYSNDEHPTYYSSAKPFSSIESRAVLAPSLFKWITQLEVYTKKYSYSSQYTTLWTGLRVIAQPTKDFTDTVYDYGSSSGSENKDVFDLYGNDVYDTQSVVSSYKPTGGGHFGVPQFRLFWITKSNGLREQIFNYANNMGSYSAYRFSKDELPIELLQPPLFGDIEEYSHRLSHVSEVIKDYGEGIIPVLGWTHVSVTRDNRIYPDKITQLPAVKMYELLSSAVVVKGPGFTGGDLVKRTGNGGIGHFNVSVESPGTQRYRLRIRYSSEVSGVFHMQINDIETIQGEFSSTADSTSTLSSEAFQLREYSTTFTFPTNMTKIKVSLGAIEGAGGFYLDRIEFIPVDENHDNRVTLEKAQKAVNALFTAGRNALQTDVTDYKVDQVSILVDCVSGELYPNEKRELLSLVKYAKRLSYSRNLLLDPTFDSINSSDENGWYGSNGIAIGNGNFVFKGNYLIFSGTNDTQYPTYLYQKIDESKLKEYTRYKLRGFIENSQDLEAYVIRYDAKHETLDVSNNLLPDISPVNACGEPNRCAALQYLDENPRLECSSIQDGILSDSHSFSLNIDTGSIDFNENVGIWVLFKISTPEGYAKFGNLEVIEDSPVIGEALARVKRQETKWRNKLTQLRTETQAIYTRAKQAIDNVFTNAQDSHLKIGTTFAAIVAARKIVQSIREAYMSWLSIVPGVNYPIFTELNERVQRAFQLYDVRNVVRNGRFLNGVSDWIVTSDVKVQEENGNNVLVLSNWDAQVLQCLKLYQDRGYILRVTARKEGLGEGYITITDEEGHTDQLTFGTCEEIDASNTFVTTGYITKELEFFPDTEKVRIEIGETEGTFQVESIELFLMEDLC

SEQ ID NO: 467 - protein, 1144 aa, Bacillus thuringiensis BTH-13
MDKQNDSGIIKATLNEDFSNSIQRYPLVTDQTINYKDFLNMNEEIAPYASSKDVIFSSISIIRTFMGFAGHGTAGGIIGLFTEVLRLLWPNKQNDLWESFMNEVEALINQEITEAVVSKALSELEGLRNALEGYTSALEAWQNNRSDKLKQLLVYERFVSTENLFKFAMPSFRSVGFEGPLLTVYAQAANLHLFLLKNAELFGAEWGMQQYEIDLFYNEQKGYVEEYTDHCVKWYKEGLNKLKNASGVKGKVWENYNRFRREMTIMVLDLLPLFPIYDARTYPMETVTELTRQIFTDPIGLTGINETKYPDWYGAASSEFVLIENRAIPKPGLFQWLTKINVRARVVEPNDRFAIWTRHSVVTQCTKSTTENTFNYGTSSGSTLSHTFDLLSKDIYQTYSIAAANKSATWYQAVPLLRLYGINSSNVLSEDAFSFSNNIPSSKCKSTYSSDQLPIELLDEPIYGDLEEYGHRLSYVSEIFKETGSGTIPVLGWTHVSVRPDNKLYPDKITQIPAVKAFETNTAGVEIIDSASTGGPILKIVNNNLPSNQVFRMRLSFSEPQKIKVRVRYAATGDGVMSFSGIAHDEYFTATMKEGEALKYSYLTMGNDYAGTAAELSMLYIIKANTSNCTIYIDKIEFIPVDENYNNRVQLEKAQKAVNTLFTAGRNALQKDVTDFKVDQVSILVDCVSGELYPNEKRELLSLVKYAKRLSYSRNLLLDPTFDSINSSEENGWNGSNGIAIGSGDFVFKGNYLIFSGTNDEQYPTYLYQKIDESKLKEYTRYKLRGFIESSQDLEAYVIRYDAKHETLDVSNNLLPDIPPVNACGEPNRCAALQYLDENPKLECSSIQDGILSDSHSFSLHIDTGSIDFNENVGIWVLFKISTPEGYAKFGNLEVIEDGPVIGEALARVKRQETKWRNKLTQLRTETQAIYTRAKQALDNLFTDAQDSHLKIGATFAAIVAARKIVQSIREAYMSWLSDVPGLNYPIFTELNDRVQRAFQLYDVQNVVRNGRFLNGVLDWIVTSDVKVQEGNGNNVLVLSGWDAQVLQCLNLYQNRGYILRVTARKEGLGEGYITITDEEGNTDQLTFGSCENIDSSNSFVSTGYITKELEFFPDTDQIQIEIGETEGTFQVESVELFLMENLC

SEQ ID NO: 468 - protein, 1144 aa, Bacillus thuringiensis LH-2
MDQQNEYEIIQAGVSNAITDTFQRYPLANNPNTSFQNMNYKDYLNDPMFLGETRDAQTAITTSLEIISEILGFLGVPFVGPIIGFTNRLINLLWPRNTTDIWNAFMDEVQALINESITKAVRSKAISELEGIHQVYRLYIEALNEWKDTPDNPFVQERVRTTFRDVNSIINYAMPSFRVQGFEIPLLVVYAQAANLHLVLLRDATLFGAGWGFTETNINDRYNEQVRVTNGYIDHCTKWYNEGLTRLKNNWSKYHQFRREMTLMVLDLIALFPSHDARRYPMETSAQLTRDVYTDPIGYRGNANFSDPWTNHVSFSKAESETIRPPHLFDTLESVEINTAKAMLPLNDKSYMYYWAGHTVTSRLLDSSGNPLKYTYGSMTSEKNLVSLPGKDVYRINSVASGFSNYYAKLYGVSKVDFSIVDRNNSNKTTYSYSKSSTVPSDNKENRDSENELPQTTTDQPDYKGYSHRLSHITFISSAIPTYVWTRKSADLTNTIYPDKITQIPAVKMYELGSSAVVVKGPGFTGGDLVKRTNNGSLGRFKITIDSPGAHRYRLRVRYHSDVSGVFHMQINNVETIQGEFKSTVDSTSTMSNDSFQLREFTTTFRFPSNVTDIKVSLGAINGQGNFYLDRIEFAPVDTNYDERITLEKAQKAVNALFTEGRNALQTDMTDYKVDQVSILVDCVSGEVYPNEKRELLNLVKYAKRLSIARNLLVDPNFTSIHASMYSEDVKGWYGSNGIATGSGDVVLKENYVSLPSTSDAQYPTYLYQKIDESKLKAYTRYKLRGFIENSQDLEAYVVRYDAKHETLDVSNNLLPDVLPVNACGEPDRCAALQYLDENPRLECSSIQDGILSDSHSFSLNIDTGSMDLNENLGIWVLFKISTPEGYAKFGNLEVIEDGTVSGEALARVKRQETKWRNKLAQLRTETQAIYTRAKQALDNLFTDAQDSYLKIGATFAAIVAARKIVQSIREAYMSWLSVVPGVNYPIFTELNERVQRAFQLYDGRNVVRNGRFLNGVLDWIVTSDVSVQEENGNNVLVLSNWDAQVLQCLKLYQDRGYILRVTARKEGLGEGYITITDEEGNTDQLTFGSCEEIDTSNSFVSTGYMTKELEFFPDTEKVRIEIEETEGTFKVESVELFLMEDLC

SEQ ID NO: 469 - protein, 1157 aa, Bacillus thuringiensis serovar tochigiensis BGSC 4Y1
MDTRNQKKYEELQPALNDTFSNTAPKYPLACDPTKQCQNMNYKDYLNMTEGGAPYVSSRDVIFSSLAITRTFLGLAGLGTAGGMIGLFTEALRLLWPNKTEDLWKAFMDEVEKLINQKITDAVVSKALSELQGLANALEGFTNALEAWQNNRSDKLQQLLVYERFVATETLFKYAIPSFRVSGFEVPLLTVYAQAANLHLCLLKNAELFGADWGMPQYEIDVFYNEQKGYIEEYTDHCVTWYNSGLNQLKNVSGVKGKVWENYNRFRREMTIMVLDILPLFPIYDTRTYLMETTIELTRQIFTDPIGLTGINETKYPDWYEAASTEFILIENNAVPKPTLFQWLTKFNVWGRTVNPNDTFTIWTGHSVVTRYTKDSAEHTFNYGTSSGSTLSYTFDLLSKDVYQTYSLAETNKSATWYFAVPMLKLYSINNNNKLSEEYFSFPTNIPSSKGKRTYSSDQLPIELSDSPIYGDLEEYSHRLSYVSEIFKKTGSGTIPVLGWTHVSVSPDNRIFTDKITKLPVVKATQLSGEVITGPGFTGGNIIKSNVASTEPTKIIVLLNISPPSSKTKYSFRIRYAADAPGRLQITDGNYIAGLTQEFKATMEVGSSLKYNSFQYLTFSTGSLGTGSNYLKIYALQSPSSFSYNIYIDSIECIPVPVNYDDSVTLENAQKAVNALFTASSNALKREVTDYVVDQASILVDCVSEELYPNEKRELLHLVKYAKRLSAVRNLLLDPTFESINSSDVNGWYGSNGIAIGSGDFVFKGKYVSLPGTNDERYPTYLFQKIDESKLKEYTRYKLRGFVESSQDLEVYVIRYDAKHETLHVSDNLIPNVPPVNECGEPNRCAQQQYLSGNPTLEQYYVTKGVLYDSHAFSLDIDTGSVDPNEHLGIWVLFKISTTRGFAKLGNVEVIEDGLLTGEALARVKRKETKWKNKLEQLRAETQAISTRANQALDSLFADAQDSKLKLGVTFATIVAARKIVQSIRDVYMPWLSIVSGVNYSIFTELMGRVQLALQLYDLRNMVRNGRFLNGISDWGVTSDVKVQEEDGNLVLVLSNWDAQVLQCVKLYPDRGYILRVTARKEGLGEGYVTICGEEGNTDTLTFGTCDDTDRLQSVVSTGYVTKELEFFPDTENVQIEIGETEGVFQVESVELFLMEE

SEQ ID NO: 470 - protein, 1117 aa, Bacillus thuringiensis serovar tochigiensis BGSC 4Y1
MRVNRNELRTLPEGFASSTESAVTNTLNIISIILDATGHPVAGKVLGVITGILGILWPGGSEKAWEEFMEAVEQLVDEKITDAFKSEALSKLDGLSQLYNVYLSELELWIERPNDPSVIQSVRTRFLDLDSEFISSMPQFAINGFEIQFLPVYAHAANLHLLLLRDLSYYGKNWGLQEPEIENFYKRQMDNIQKYTDHCVEWYERGLQEVYNSFTSTNINEDGGLPWTHYNRYRREMTVYVLDLIATFPTNDWKKYHLETNVELSREIYTDPLGYEDDDTEDITDVDWYSEGVSFSEIENMHPPRLVEWLNKVYIYTDYFEAGSDESYAWVSHIITSSFTDSNEEHSRSYGSTESVEESEGISFYPAEIYKVVSVVGSERNATYDNYVNSANTFYGVTPTNELKTFTYSYRNDYDKKTLYSDDQLPLETDTPKYGEYSHRLSNITIAPLNSDDFGLVPILGWTHTSLKRENRIYPDKITQIPAVKSVEGGVVVKGPGFTGGNLIKAETTQGQIVKIVKFKVKVDGSLSQKYRVRVNYAANSDGRIDFYFAGQVVLQSDFIKTMDNNDISKFSSFGYLDIDFPFNFSHSELEVLSQISLKTTGVFYINNIEFIPEIEGYDEKVTLEKAQKAVNALFTAGRNAIQTDVTDYKVDQVSNLVDCVSEELYPNEKQELQNLVKYAKRLSISRNLLLDPNFTSINAPKVRGWHGSPGIIVGNGNYIFKGPYVHLQGTNDAQDPTYLYQKIDESKLKEYTRYKLRGFIESSQDLEVSVIRYDAKHETVDVSDNLLSDNLPKNACGEPNRCILQQYIENNPTLECSSIQDGILFDSHSFSLNIDTGSINYNENVGIWVVFKISTLEGYAKVGNIEVIEEAPLVGEALARVKRQETKWRNKLEQLRAETQVIYTRAKQAIDNLFTDIQDSKLKMEVTFATIVAAREIVQSIREAYMPWLSVVPGVNYPIFTELNVRVRRALQLYDLRNVVRNGRFRHGLSNWIVTSDVKIQEENGNNVLVLSGWDAQVLQHVKLYPDRGYILRVTAHKEGLGEGYITIMDEEGHTDQLTFGACEKIDASNTFMSTGYITKELEFFPDTEKVHIEIGETEGIFKVESIALFLMEEQC

SEQ ID NO: 471 - protein, 1157 aa, Bacillus thuringiensis kumamotoensis
MSPNNQNEYEIIDATPSTSVSSDSNRYPFANEPTDALQNMNYKDYLKMSGGENPELFGNPETFISSSTIQTGIGIVGRILGALGVPFASQIASFYSFIVGQLWPSKSVDIWGEIMERVEELVDQKIEKYVKDKALAELKGLGNALDVYQQSLEDWLENRNDARTRSVVSNQFIALDLNFVSSIPSFAVSGHEVLLLAVYAQAVNLHLLLLRDASIFGEEWGFTPGEISRFYNRQVQLTAEYSDYCVKWYKIGLDKLKGTTSKSWLNYHQFRREMTLLVLDLVALFPNYDTHMYPIETTAQLTRDVYTDPIAFNIVTSTGFCNPWSTHSGILFYEVENNVIRPPHLFDILSSVEINTSRGGITLNNDAYINYWSGHTLKYRRTADSTVTYTANYGRITSEKNSFALEDRDIFEINSTVANLANYYQKAYGVPGSWFHMVKRGTSSTTAYLYSKTHTALQGCTQVYESSDEIPLDRTVPVAESYSHRLSHITSHSFSKNGSAYYGSFPVFVWTHTSADLNNTIYSDKITQIPAVKGDMLYLGGSVVQGPGFTGGDILKRTNPSILGTFAVTVNGSLSQRYRVRIRYASTTDFEFTLYLGDTIEKNRFNKTMDNGASLTYETFKFASFITDFQFRETQDKILLSMGDFSSGQEVYIDRIEFIPVDETYEAEQDLEAAKKAVNALFTNTKDGLRPGVTDYEVNQAANLVECLSDDLYPNEKRLLFDAVREAKRLSGARNLLQDPDFQEINGENGWAASTGIEIVEGDAVFKGRYLRLPGAREIDTETYPTYLYQKVEEGVLKPYTRYRLRGFVGSSQGLEIYTIRHQTNRIVKNVPDDLLPDVSPVNSDGSINRCSEQKYVNSRLEGENRSGDAHEFSLPIDIGELDYNENAGIWVGFKITDPEGYATLGNLELVEEGPLSGDALERLQREEQQWKIQMTRRREETDRRYMASKQAVDRLYADYQDQQLNPDVEITDLTAAQDLIQSIPYVYNEMFPEIPGMNYTKFTELTDRLQQAWNLYDQRNAIPNGDFRNGLSNWNATPGVEVQQINHTSVLVIPNWDEQVSQQFTVQPNQRYVLRVTARKEGVGNGYVSIRDGGNQSETLTFSASDYDTNGVYNDQTGYITKTVTFIPYTDQMWIEISETEGTFYIESVELIVDVE

SEQ ID NO: 472 - protein, 1180 aa, Bacillus thuringiensis B-JJX
MSPNNQNEYEIIDATPSTSVSNDSNRYPSANEPTNALQNMNYKDYLRISEGYDSEYSGSPGAFISEKDAIKVGIDIVGNILGKLGVPFASQIVSFYNFILDQLWPSNSVSVWEQIMTLVEELVDQKITEYARNKALAELKGLGDALGVYQQSLEAWLENRNDTRARSVVSNQFIALELDFVGAIPSFAVSGQEVPLLAVYAQAVNMHLLLLRDASIFGEEWGFTSSEISTYYNRQVQLTSQYSDYCVKWYDTGLQKLKGTSAESWLEYHQFRREMTFMVLDLVALFPNYDTHTYPLETKAQLTREVYTDPIAFNLSGAAGFCRPWSKYTGISFSEIENAVIRPPHLFNVLRSLEINTVRGTILGNTKDYLNYWSGHSLQYNFIGNITVRESNYGYLTSEKTRIQLDTRDIFEINSTAASLANYYQETYGVPESRFHLVRWASPYDTSSHLYSKTHTTGEGCTQVYESSEEIPVDRTVPVNEGYGHRLSYVTALFFQKIINTFYRNGTLPVFVWTHRSADLTNTIYPDKITQIPAVKGDQLWDGTSVVAGPGFTGGDIIRKTYGNTGYEIINVSLEVPNPNQDYFIRIRYAATNDITLSVNLFPGFLTGNFQSTMNKGEPLTYGKFKYANFQSTKFNSSKQTIRLSVSGLTVPSGTEIYIDKIEFIPVDATYEAETDLEAAKKAVKALFSNTTDTLLPGVTDYEVNQAANLVECLSDDLYPNEKRLLFDAVREAKRLSEARNLLQDPDFQEINGENGWTASTGVEIIEGDAVFKGRYLRLPGAREMDTETYPTYVYQKIEEGVLKPYTRYRLRGFVGSSQGLEIYTIRHQTNRIVKNVPDDLLPDVTSVNAGGGINRCSEQKYVNSRLEGERGLPNGNRSAEAHEFSLPINIGELDYNENAGIWVGFKITDPEGYATLGNLGLVEEGPLSGDALERLQREEQQWKLQMTKRREETDRKYTAAKQAVDRLYADYQDQQLNPNVEITDITAAQDLIQSIPYVYNEIFPEIQGMNYAKFTELSNRLQRAWGLYDQRNAIPNGDFRNGLSNWNTTPGVEVQQINDTSVLVIPNWDEQVSQQFTVQPNQRYVLRVTARKEGVGNGYVSIRDGGNQTETLTFSASDYDTNSVYNTQASNTNGLYNEQTGYITKTVTFIPYTDQVWIEMSETEGTFYIESVELIVDVE

SEQ ID NO: 473 - protein, 1169 aa, Bacillus thuringiensis kumamotoensis
MSPNNQNEYEIIDATPSTSVSNDSNRYPFANEPTNALQNMDYKDYLKMSAGNVSEYPGSPEVFLSEQDAVKAAIDIVGKLLTGLGVPFVGPIVSLYTQLIDILWPSKQKSQWEIFMEQVEELINQKIAEYARNKALSELEGLGNNYQLYLTALEEWKENPNGSRALRDVRNRFEILDSLFTQYMPSFRVTNFEVPFLTVYTMAANLHLLLLRDASIFGEEWGLSTSTINNYYNRQMKLTAEYSDHCVKWYETGLAKLKGSSAKQWIDYNQFRREMTLTVLDVVALFSNYDTRTYPLATTAQLTREVYTDPLGAVDVPNIGSWYDKAPSFSEIEKAAIRPPHVFDYITGLTVYTKKRSFTSDRYMRYWAGHQISYKHIGTSSTFTQMYGTNQNLQSTSNFDFTNYDIYKTLSNGAVLLDIVYPGYTYTFFGMPETEFFMVNQLNNTRKTLTYKPASKDIIDRTRDSELELPPETSGQPNYESYSHRLGHITFIYSSSTSTYVPVFSWTHRSADLTNTVKSGEITQIPGGKSSTIGRNTYIIKGRGYTGGDLVALTDRIGSCEFQMIFPESQRFRIRIRYASNETSYISLYGLNQSGTLKFNQTYSNKNENDLTYNDFKYIEYPRVISVNASSNIQRLSIGIQTNTNLFILDRIEFIPVDETYEAETDLEAAKKAVNALFTNTKDGLQPGVTDYEVNQAANLVECLSDDLYPNEKRLLFDAVREAKRLSEARNLLQDPDFQEINGENGWTASTGIEVIEGDAVFKGRYLRLPGAREIDTETYPTYLYQKVEEGVLKPYTRYRLRGFVGSSQGLEIYTIRHQTNRIVKNVPDDLLPDVPPVNNDGRINRCSEQKYVNSRLEVENRSGEAHEFSIPIDTGELDYNENAGIWVGFKITDPEGYATLGNLELVEEGPLSGDALERLQKEEQQWKIQMTRRREETDRRYMASKQAVDRLYADYQDQQLNPNVEITDLTAAQDLIQSIPYVYNEMFPEIPGMNYTKFTELTDRLQQAWGLYDQRNAIPNGDYRNELSNWNTTSGVNVQQINHTSVLVIPNWNEQVSQKFTVQPNQRYVLRVTARKEGVGNGYVSIRDGGNQSETLTFSASDYDTNGMYDTQASNTNGYNTNSVYMIKPAISRKTVDISSVYNQMWIEISETEGTFYIESVELIVDVE

SEQ ID NO: 474 - protein, 1206 aa, Bacillus thuringiensis
MSPNNQNEYEIIDATPSTSVSNDSNRYPFANEPTNALQNMDYKDYLKMSAGNASEYPGSPEVLVSGQDAAKAAIDIVGKLLSGLGVPFVGPIVSLYTQLIDILWPSGEKSQWEIFMEQVEELINQKIAEYARNKALSELEGLGNNYQLYLTALEEWEENPNGSRALRDVRNRFEILDSLFTQYMPSFRVTNFEVPFLTVYAMAANLHLLLLKDASIFGEEWGWSTTTINNYYDRQMKLTAEYSDHCVKWYETGLAKLKGTSAKQWVDYNQFRREMTLAVLDVVALFPNYDTRTYPMETKAQLTREVYTDPLGAVNVSSIGSWYDKAPSFGVIESSVIRPPHVFDYITGLTVYTQSRSISSARYIRHWAGHQISYHRVSRGSNLQQMYGTNQNLHSTSTFDFTNYDIYKTLSKDAVLLDIVYPGYTYIFFGMPEVEFFMVNQLNNTRKTLKYNPVSKDIIASTRDSELELPPETSDQPNYESYSHRLCHITSIPATGNTTGLVPVFSWTHRSADLNNTIYSDKITQIPAVKCWDNLPFVPVVKGPGHTGGDLLQYNRSTGSVGTLFLARYGLALEKAGKYRVRLRYATDADIVLHVNDAQIQMPKTMNPGEDLTSKTFKVADAITTLNLATDSSLALKHNLGEDPNSTLSGIVYVDRIEFIPVDETYEAEQDLEAAKKAVNALFTNTKDGLRPGVTDYEVNQAANLVECLSDDLYPNEKRLLFDAVREAKRLSEARNLLQDPDFQEINGENGWTASTGIEVIEGDALFKGRYLRLPGAREIDTETYPTYLYQKVEEGVLKPYTRYRLRGFVGSSQGLEIFTIRHQTNRIVKNVPDDLLPDVSPVNSDGSINRCSEQKYVNSRLEVENRSGEAHEFSIPIDTGEIDYNENAGIWVGFKITDPEGYATLGNLELVEEGPLSGDALERLQREEQQWKIQMTRRREETDRRYMASKQAVDRLYADYQDQQLNPDVEITDLTAAQDLIQSIPYVYNEMFPEIPGMNYTKFTELTDRLQQAWSLYDQRNAIPNGDFRNGLSNWNATPGVEVQQINHTSVLVIPNWDEQVSQQFTVQPNQRYVLRVTARKEGVGNGYVSIRDGGNQTETLTFSASDYDTNGMYNTQVSNTNGYNTNNAYNTQASSTNGYNANNMYNTQASNTNGYNTNSVYNDQTGYITKTVTFIPYTDQMWIEMSETEGTFYIESVELIVDVE

SEQ ID NO: 475 - protein, 1210 aa, Bacillus thuringiensis
MSPNNQNEYEIIDATPSTSVSNDSNRYPFANEPTNALQNMDYKDYLKMSAGNASEYPGSPEVLVSGQDAAKAAIDIVGKLLSGLGVPFVGPIVSLYTQLIDILWPSGQKSQWEIFMEQVEELINQKIAEYARNKALSELEGLGNNYQLYLTALEEWKENPNGSRALRDVRNRFEILDSLFTQYMPSFRVTNFEVPFLTVYTQAANLHLLLLKDASIFGEEWGWSTTTINNYYDRQMKLTAEYSDHCVKWYETGLAKLKGTSAKQWVDYNQFRREMTLTVLDVVALFPNYDTRTYPMETKAQLTREVYTDPLGAVNVSSIGSWYDKAPSFGVIESSVIRPPHVFDYITGLTVYTQSRSISSARYIRHWAGHQISYHRIFSDNIIKQMYGTNQNLHSTSTFDFTNYDIYKTLSKDAVLLDIVFPGYTYIFFGMPEVEFFMVNQLNNTRKTLKYNPVSKDIIAGTRDSELELPPETSDQPNYESYSHRLCHITSIPATGSTTGLVPVFSWTHRSADLINAVHSDKITQIPVVKVSDLAPSITGGPNNTVVSGPGFTGGGIIKVIRNGVIISHMRVKISDINKEYSMRIRYASANNTEFYINPSEENVKSHAQKTMNRGEALTYNKFNYATLPPIKFTTTEPFITLGAIFEAEDFLGIEAYIDRIEFIPVDETYEAEQDLEAAKKAVNALFTNTKDGLRPGVTDYEVNQAANLVECLSDDLYPNEKRLLFDAVREAKRLSEARNLLQDPDFQEINGENGWTASTGIEVIEGDALFKGRYLRLPGAREIDTETYPTYLYQKVEEGVLKPYTRYRLRGFVGSSQGLEIFTIRHQTNRIVKNVPDDLLPDVSPVNSDGSINRCSEQKYVNSRLEVENRSGEAHEFSIPIDTGEIDYNENAGIWVGFKITDPEGYATLGNLELVEEGPLSGDALERLQREEQQWKIQMTRRREETDRRYMASKQAVDRLYADYQDQQLNPDVEITDLTAAQDLIQSIPYVYNEMFPEIPGMNYTKFTELTDRLQQAWSLYDQRNAIPNGDFRNGLSNWNATPGVEVQQINHTSVLVIPNWDEQVSQQFTVQPNQRYVLRVTARKEGVGNGYVSIRDGGNQTETLTFSASDYDTNGMYNTQVSNTNGYNTNNAYNTQASSTNGYNANNMYNTQASNTNGYNTNSVYNDQTGYITKTVTFIPYTDQMWIEMSETEGTFYIESVELIVDVE

SEQ ID NO: 476 - protein, 1160 aa, Bacillus thuringiensis japonensis Buibui
MSPNNQNEYEIIDALSPTSVSDNSIRYPLANDQTNTLQNMNYKDYLKMTESTNAELSRNPGTFISAQDAVGTGIDIVSTIISGLGIPVLGEVFSILGSLIGLLWPSNNENVWQIFMNRVEELIDQKILDSVRSRAIADLANSRIAVEYYQNALEDWRKNPHSTRSAALVKERFGNAEAILRTNMGSFSQTNYETPLLPTYAQAASLHLLVMRDVQIYGKEWGYPQNDIDLFYKEQVSYTARYSDHCVQWYNAGLNKLRGTGAKQWVDYNRFRREMNVMVLDLVALFPNYDARIYPLETNAELTREIFTDPVGSYVTGQSSTLISWYDMIPAALPSFSTLENLLRKPDFFTLLQEIRMYTSFRQNGTIEYYNYWGGQRLTLSYIYGSSFNKYSGVLAGAEDIIPVGQNDIYRVVWTYIGRYTNSLLGVNPVTFYFSNNTQKTYSKPKQFAGGIKTIDSGEELTYENYQSYSHRVSYITSFEIKSTGGTVLGVVPIFGWTHSSASRNNFIYATKISQIPINKASRTSGGAVWNFQEGLYNGGPVMKLSGSGSQVINLRVATDAKGASQRYRIRIRYASDRAGKFTISSRSPENPATYSASIAYTNTMSTNASLTYSTFAYAESGPINLGISGSSRTFDISITKEAGAANLYIDRIEFIPVNTLFEAEEDLDVAKKAVNGLFTNEKDALQTSVTDYQVNQAANLIECLSDELYPNEKRMLWDAVKEAKRLVQARNLLQDTGFNRINGENGWTGSTGIEVVEGDVLFKDRSLRLTSAREIDTETYPTYLYQQIDESLLKPYTRYKLKGFIGSSQDLEIKLIRHRANQIVKNVPDNLLPDVRPVNSCGGVDRCSEQQYVDANLALENNGENGNMSSDSHAFSFHIDTGEIDLNENTGIWIVFKIPTTNGNATLGNLEFVEEGPLSGETLEWAQQQEQQWQDKMARKRAASEKTYYAAKQAIDRLFADYQDQKLNSGVEMSDLLAAQNLVQSIPYVYNDALPEIPGMNYTSFTELTNRLQQAWNLYDLQNAIPNGDFRNGLSNWNATSDVNVQQLSDTSVLVIPNWNSQVSQQFTVQPNYRYVLRVTARKEGVGDGYVIIRDGANQTETLTFNICDDDTGVLSTDQTSYITKTVEFTPSTEQVWIDMSETEGVFNIESVELVLEEE

SEQ ID NO: 477 - protein, 1160 aa, Bacillus thuringiensis HBF-1
MSPNNQNEYEIIDALSPTSVSDNSIRYPLANDQTNTLQNMNYKDYLKMTESTNAELSRNPGTFISAQDAVGTGIDIVSTIISGLGIPVLGEVFSILGSLIGLLWPSNNENVWQIFMNRVEELIDQKILDSVRSRAIADLANSRIAVEYYQNALEDWRKNPHSTRSAALVKERFGNAEAILRTNMGSFSQTNYETPLLPTYAQAASLHLLVMRDVQIYGKEWGYPQNDIDLFYKEQVSYTARYSDHCVQWYNAGLNKLRGTGAKQWVDYNRFRREMNVMVLDLVALFPNYDARIYPLETNAELTREIFTDPVGSYVTGQSSTLISWYDMIPAALPSFSTLENLLRKPDFFTLLQEIRMYTSFRQNGTIEYYNYWGGQRLTLSYIYGSSFNKYSGVLAGAEDIIPVGQNDIYRVVWTYIGRYTNSLLGVNPVTFYFSNNTQKTYSKPKQFAGGIKTIDSGEELTYENYQSYSHRVSYITSFEIKSTGGTVLGVVPIFGWTHSSASRNNFIYATKISQIPINKASRTSGGAVWNFQEGLYNGGPVMKLSGSGSQVINLRVATDAKGASQRYRIRIRYASDRAGKFTISSRSPENPATYSASIAYTNTMSTNASLTYSTFAYAESGPINLGISGSSRTFDISITKEAGAANLYIDRIEFIPVNTLFEAEEDLDVAKKAVNGLFTNEKDALQTSVTDYQVNQAANLIECLSDELYPNEKRMLWDAVKEAKRLVQARNLLQDTGFNRINGENGWTGSTGIEVVEGDVLFKDRSLRLTNAREIDTETYPTYLYQQIDESLLKPYTRYKLKGFIGSSQDLEIKLIRHRANQIVKNVPDNLLPDVRPVNSCGGVDRCSEQQYVDANLALENNGENGNMSSDSHAFSFHIDTGEIDLNENTGIWIVFKIPTTNGNATLGNLEFVEEGPLSGETLEWAQQQEQQWQDKMARKRAASEKTYYAAKQAIDRLFADYQDQKLNSGVEMSDLLAAQNLVQSIPYVYNDALPEIPGMNYTSFTELTNRLQQAWNLYDLQNAIPNGDFRNGLSNWNATSDVNVQQLSDTSVLVIPNWNSQVSQQFTVQPNYRYVLRVTARKEGVGDGYVIIRDGANQTETLTFNICDDDTGVLSTDQTSYITKTVEFTPSTEQVWIDMSETEGVFNIESVELVLEEE

SEQ ID NO: 478 - protein, 1160 aa, Bacillus thuringiensis FTL-23
MSPNNQNEYEIIDALSPTSVSDNSIRYPLANDQTNTLQNMNYKDYLKMTESTNAELSRNPGTFISAQDAVGTGIDIVSTIISGLGIPVLGEVFSILGSLIGLLWPSNNENVWQIFMNRVEELIDQKILDSVRSRAIADLANSRIAVEYYQNALEDWRKNPHSTRSAALVKERFGNAEAILRTNMGSFSQTNYETPLLPTYAQAASLHLLVMRDVQIYGKEWGYPQNDIDLFYKEQVSYTARYSDHCVQWYNAGLNKLRGTGAKQWVDYNRFRREMNVMVLDLVALFPNYDARIYPLETNAELTREIFTDPVGSYVTGQSSTLISWYDMIPAALPSFSTLENLLRKPDFFTLLQEIRMYTSFRQNGTIEYYNYWGGQRLTLSYIYGSSFNKYSGVLAGAEDIIPVGQNDIYRVVWTYIGRYTNSLLGVNPVTFYFSNNTQKTYSKPKQFAGGIKTIDSGEELTYENYQSYSHRVSYITSFEIKSTGGTVLGVVPIFGWTHSSASRNNFIYATKISQIPINKASRTSGGAVWNFQEGLYNGGPVMKLPGSGSQVINLRVATDAKGASQRYRIRIRYASDRAGKFTISSRSPENPATYSASIAYTNTMSTNASLTYSTFAYAESGPINLGISGSSRTFDISITKEAGAANLYIDRIEFIPVNTLFEAEEDLDVAKKAVNGLFTNEKDALQTSVTDYQVNQAANLIECLSDELYPNEKRMLWDAVKEAKRLVQARNLLQDTGFNRINGENGWTGSTGIEVVEGDVLFKDRSLRLTSAREIDTETYPTYLYQQIDESLLKPYTRYKLKGFIGSSQDLEIKLIRHRANQVVKNVPDNLLPDVRPVNSCGGVDRCSEQQYVDANLALENNGENGNMSFDSHAFSFHIDTGEIDLNENTGIWIVFKIPTTNGNATLGNLEFVEEGPLSGETLEWAQQQEQQWQDKMARKRAASEKTYYAAKQAIDRLFADYQDQKLNSGVEMSDLLAAQNLVQSIPYVYNDALPEIPGMNYTSFTELTNRLQQAWNLYDLQNAIPNGDFRNGLSNWNATSDVNVQQLSDTSVLVIPNWNSQVSQQFTVQPNYRYVLRVTARKEGVGDGYVIIRDGANQTETLTFNICDDDTGVLSTDQTSYITKTVEFTPSTEQVWIDMSETEGVFNIESVELVLEEE

SEQ ID NO: 479 - protein, 1160 aa, Bacillus thuringiensis S185
MSPNNQNEYEIIDALSPTSVSDNSIRYPLANDQTNTLQNMNYKDYLKMTESTNAELSRNPGTFISAQDAVGTGIDIVSTIISGLGIPVLGEVFSILGSLIGLLWPSNNENVWQIFMNRVEELIDQKILDSVRSRAIADLANSRIAVEYYQNALEDWRKNPHSTRSAALVKERFGNAEAILRTNMGSFSQTNYETPLLPTYAQAASLHLLVMRDVQIYGKEWGYPQNDIDLFYKEQVSYTARYSDHCVQWYNAGLNKLRGTGAKQWVDYNRFRREMNVMVLDLVALFPNYDARIYPLETNAELTREIFTDPVGSYVTGQSSTLISWYDMIPAALPSFSTLENLLRKPDFFTLLQEIRMYTSFRQNGTIEYYNYWGGQRLTLSYIYGSSFNKYSGVLAGAEDIIPVGQNDIYRVVWTYIGRYTNSLLGVNPVTFYFSNNTQKTYSKPKQFAGGIKTIDSGEELTYENYQSYSHRVSYITSFEIKSTGGTVLGVVPIFGWTHSSASRNNFIYATKISQIPINKASRTSGGAVWNFQEGLYNGGPVMKLSGSGSQVINLRVATDAKGASQRYRIRIRYASDRAGKFTISSRSPENPATYSASIAYTNTMSTNASLTYSTFAYAESGPINLGISGSSRTFDISITKEAGAANLYIDRIEFIPVNTLFEAEEDLDVAKKAVNGLFTNEKDALQTSVTDYQVNQAANLIECLSDELYPNEKRMLWDAVKEAKRLVQARNLLQDTGFNRINGENGWTGSTGIEVVEGDVLFKDRSLRLTSAREIDTETYPTYLYQQIDESLLKPYTRYKLKGFIGSSQDLEIKLIRHRANQIVKNVPDNLLPDVRPVNSCGGVDRCSEQQYVDANLALENNGENGNMSSDSHAFSFHIDTGEIDLNENTGIWIVFKISTTNGNATLGNLEFVEEGPLSGETLEWAQQQEQQWQDKMARKRAASEKTYYAAKQAIDRLFADYQDQKLNSGVEMSDLLAAQNLVQSIPYVYNDALPEIPGMNYTSFTELTNRLQQAWNLYDLQNAIPNGDFRNGLSNWNATSDVNVQQLSDTSVLVIPNWNSQVSQQFTVQPNYRYVLRVTARKEGVGDGYVIIRDGANQTETLTFNICDDDTGVLSTDQTSYITKTVEFTPSTEQVWIDMSETEGVFNIESVELVLEEE

SEQ ID NO: 480 - protein, 1144 aa, Bacillus thuringiensis galleriae
MSPNNQNEYEILDASSSTSVSDNSVRYPLANDQTTTLQNMNYKDYLRMSEGENPELFGNPETFISSSTVQTGIGIVGQVLGALGVPFAGQIASFYSFIVGQLWPSSTVSVWEMIMKQVEDLIDQKITDSVRKTALAGLQGLGDGLDVYQKSLKNWLENRNDTRARSVVVTQYIALELDFVAKIPSFAISGQEVPLLSVYAQAANLHLLLLRDASIFGAEWGFTPGEISTFYDRQVTRTAQYSDYCVKWYNTGLDKLKGTNAASWLKYHQFRREMTLLVLDLVALFPNYDTRTYPIETTAQLTREVYTDPIVFNRETSGGFCRRWSLNSDISFSEVESAVIRSPHLFDILSEIEFYTTRAGLPLNNTEYLEYWVGHSIKYKNTNASSALERNYGTITSNKIKYYDLANKDIFQVRSLGADLANYYAQVYGVPYASFTLLDKNTGSGSVGGFTYSKPHTTMQVCTQNYNTIDEIPPENEPLSRGYSHRLSHITSYSFSKNASSPARYGNLPVFAWTHRSADVTNTVYSDKITQIPVVKAHTLVSGTTVIKGPGFTGGNILKRTSSGPLAYTSVSVKSPLSQRYRARIRYASTTNLRLFVTISGTRIYSINVNKTMNKGDDLTFNTFDLATIGTAFTFSNYSDSLTVGADSFASGGEVYVDKFELIPVNATFEAEEDLDVAKKAVKNLVECLSDELYPNEKRMLWDAVKEAKRLVQARNLLQDTGFNRINGENGWTGSTGIEVAEGDVLFKDRSLRLTSAREIDTETYPTYLYQQIDESLLKPYTRYKLKGFIGSSQDLEIKLIRHRANQIVKNVPDNLLPDVLPVNSCGGIDRCSEQQYVDANLALENNGENGNMSSDSHAFSFHIDTGEIDLNENTGIWVVFKIPTTNGYATLGNLELVEEGPLSGETLERAQQQEQQWQDKMARKRGASEKAYYAAKQAIDRLFADYQDQKLNSGVEMSDMLAAQNLVQSIPYVYNDALPEIPGMNYTSFTELTNRLQQAWNLYDLRNAIPNGDFRNGLSDWNATSDVNVQQLSDTSVLVIPNWNSQVSQQFTVQPNYRYVLRVTARKEGVGDGYVIIRDGANQTETLTFNICDDDTGVLSADQTSYITKTVEFTPSTEQVWIDMSETEGVFNIESVELVLEEE

SEQ ID NO: 481 - protein, 1167 aa, Bacillus thuringiensis
MSPNNQNEYEILDASSSTSVSDNSVRYPLANDQTTTLQNMNYKDYLRMSEGENPELFGNPETFISSSTVQTGIGIVGQVLGALGVPFAGQIASFYSFIVGQLWPSSTVSVWEMIMKQVEDLIDQKITDSVRKTALAGLQGLGDGLDVYQKSLKNWLENRNDTRARSVVVTQYIALELDFVAKIPSFAISGQEVPLLSVYAQAANLHLLLLRDASIFGAEWGFTPGEISTFYDRQVTRTAQYSDYCVKWYNTGLDKLKGTNAASWLKYHQFRREMTLLVLDLVALFPNYDTRTYPIETTAQLTREVYTDPIVFNRETSGGFCRRWSLNSDISFSEVESAVIRSPHLFDILSEIEFYTTRAGLPLNNTEYLEYWVGHSIKYKNTNASSALERNYGTITSNKIKYYDLANKDIFQVRSLGADLANYYAQVYGVPYASFTLLDKNTGSGSVGGFTYSKPHTTMQVCTQNYNTIDEIPPENEPLSRGYSHRLSHITSYSFSKNASSPARYGNLPVFAWTHRSADVTNTVYSDKITQIPVVKAHTLVSGTTVIKGPGFTGGNILKRTSSGPLAYTSVSVKSPLSQRYRARIRYASTTNLRLFVTISGTRIYSINVNKTMNKGDDLTFNTFDLATIGTAFTFSNYSDSLTVGADSFASGGEVYVDKFELIPVNATFEAEEDLDVAKKAVNGLFTSKKDALQTSVTDYQVNQAANLVECLSDELYPNEKRMLWDAVKEAKRLVQARNLLQDTGFNRINGENGWTGSTGIEVAEGDVLFKDRSLRLTSAREIDTETYPTYLYQQIDESLLKPYTRYKLKGFIGSSQDLEIKLIRHRANQIVKNVPDNLLPDVLPVNSCGGIDRCSEQQYVDANLALENNGENGNMSSDSHAFSFHIDTGEIDLNENTGIWVVFKIPTTNGYATLGNLELVEEGPLSGETLERAQQQEQQWQDKMARKRGASEKAYYAAKQAIDRLFADYQDQKLNSGVEMSDMLAAQNLVQSIPYVYNDALPEIPGMNYTSFTELTNRLQQAWNLYDLRNAIPNGDFRNGLSDWNATSDVNVQQLSDTSVLVIPNWNSQVSQQFTVQPNYRYVLRVTARKEGVGDGYVIIRDGANQTETLTFNICDDDTGVLSADQTSYITKTVEFTPSTEQVWIDMSETEGVFNIESVELVLEEE

SEQ ID NO: 482 - protein, 1174 aa, Bacillus thuringiensis BBT2-5
MSPNNQNEYEILDASSSTSVSDSSVRYPLANDQTTTLQNMNYKDCLRMSEGENPELFGNPETFISSSTVQTGIGIVGQVLGALGVPFAGQIASFYSFIVGQLWPSSTVSVWEMIMKQVEDLIDQKITDSVRKTALAGLQGLGDGLDVYQKSLKNWLENRNDTRARSVVVTQYIALELDFVAKIPSFAISGQEVPLLSVYAQAANLHLLLLRDASIFGAEWGFTPGEISTFYDRQVTRTAQYSDYCVKWYNTGLDKLKGTNAASWLKYHQFRREMTLLVLDLVALFPNYDTRTYPIETTAQLTREVYTDPIVFNRETSGGFCRRWSLNSDISFSEVESAVIRSPHLFDILSEIEFYTTRAGLPLNNTEYLEYWVGHSIKYKNTNASSALERNYGTITSNKIKYYDLANKDIFQVRSLGADLANYYAQVYGVPYASFTLLDKNTGSGSVGGFTYSKPHTTMQVCTQNYNTIDEIPPENEPLSRGYSHRLSHITSYSFSKIASSPARYGNLPVFAWTHRSADVTNTVYSDKITQIPVVKGIDLGSTSTIVNFEYNGGSIVKDTKSSTHNNSLSRIVSLMIKTEDPNPNSRSLYRIRVKYAADVPGTFRLHIQNTSPVTVPFTATMSGTNLQYSSFKYIEYIGYFNNREVGFSIESSTSQGRTRNVYIDKIEFIPVDATYIAEEDLEVAKKAVNGLFTNTKDALQTSVTDYQVNQAANLVECLSDELYPNEKRMLWDAVKEAKRLVQARNLLQDTGFNRINRENGWTGSTGIEIVEGDVLFKDRSLRLTSAREIDTETYPTYLYQQIDESLLKPYTRYKLKGFIGSSQDLEIKLIRHRANQIVKNVPDNLLPDVLPVNSCGGIDRCSEQQYVDANLALENNGENGNMSSDSHAFSFHIDTGEIDLNENTGIWVVFKIPTTNGYATLGNFELVEEGPLSGETLERAQQQEQQWQDKMARKRGASEKAYYAAKQAIDRLFADYQDQKLNSGVEMSDMLAAQNLVQSIPYVYNDALPEIPGMNYTSFTELTNRLQQAWNLYDLRNAIPNGDFRNGLSDWNATSDVNVQQLSDTSVLVIPNWNSQVSQQFTVQPNYRYVLRVTARKEGVGDGYVIIRDGANQTETLTFNICDDDTGVLSADQTSYITKTVEFTPSTEQVWIDMSETEGVFNIESVELVLEEE

SEQ ID NO: 483 - protein, 1164 aa, Bacillus thuringiensis 185
MSPNNQNEYEIIDMAPSTSVSNDSNRYPFASDPTNALQNMNYKEYLRMSEGYDSEYSGSPEVLISERDAVKTAISLVGTILGKLGVPLVGPIVSLYSTLIDVLWPGGKSQWEIFMEQVEALINQKIAEYARAKALAELEGLGNNYQLYLTALEEWQENPSSTRVLRDVRNRFEILDSLFTQYMPSFRVTGYEVPLLSVYAQAANLHLLLLKDASIFGEEWGFSTTAINNYYNRQMSLIAQYSDHCVQWYRTGLDRLKGSNAKQWVEYNRFRREMTLSVLDIMTLFPMYDMRTYPMETKAQLTREVYTDPIGAIGAQGSWYDSAPSFNTLESTFIRGKHLFDFITRLSIYTGRSSFSASNYLKKWIGHQISSQPIGGSIQTQTYGTTSGSSVIATQQIGFTGFDVYKTLSTAGVLFAYTSKYYGVSKVVFDAIYPDNKYKTTFTYNPGSEGIGAQEKDSEVELPPETLDQPNYEAYSHRLNYVTFIRNPDVPVFSWTHRSADRTNTVYSDKITQIPVVKASDGPKPSANEVGHYLGGDPISFNSSGSTGVIRLNINSPLSQKYRVRIRYCSSVDFDLDVVRGGTTVNNGRFNKSAPNVGWQSLKYENFKFASFSTPFTFNQAQDTLKISVRNFSSIVGGSVVYIDRIELIPVNATYEAEQDLDSAKKAVNTLFTNTKDGLRPGVTDYEVNQAANLVECLSDDLYPNEKRLLFDAVKEAKRLSEARNLLQDPDFQEINGENGWTASTGIEVVEGDALFKGRYLRLPGAREMDTETYPTYLYQKVEEGVLKPYTRYRLRGFVGSSQGLEISTIRHQTNRIVKNVPDDLLPDVPPVNSDGRINRCSEQKYVNSRLEGERGLPNGNRSAEAHEFSLPIDIGELDYNENAGIWVGFKITDPEGYATLGNLELVEEGPLSGDALERLQREEQQWKLQMTKRREETDRKYTAAKQAVDRLYADYQDQQLNPNVEITDITAAQNLIQSIPYVYNEMFPEIQGMNYTKYTELTNRLQQAWGLYDQRNAIPNGDFRNELSNWNTTSGVNVQQINNTSVLVMPNWDGQVSQQFTVQPNQRYVLRVTARKEGVGNGYVSIRDGGNQTETLTFSASDYNTDSVYNTQVSNTNGLYNEQTGYTTKTVTFIPYTDQVWIEMSETEGMFYIESVELIVDVE

SEQ ID NO: 484 - protein, 1164 aa, Bacillus thuringiensis B-DLL
MSPNNQNEYEIIDMAPSTSVSNDSNRYPFASDPTNALQNMNYKEYLRMSEGYDSEYSGSPEVLISERDAVKTAISLVGTILGKLGVPLVGPIVSLYSTLIDVLWPGGKSQWEIFMEQVEALINQKIAEYARAKALAELEGLGNNYQLYLTALEEWQENPSSTRVLRDVRNRFEILDSLFTQYMPSFRVTGYEVPLLSVYAQAANLHLLLLKDASIFGEEWGFSTTAINNYYNRQMSLIAQYSDHCVQWYRTGLDRLKGSNAKQWVEYNRFRREMTLSVLDIMTLFPMYDMRTYPMETKAQLTREVYTDPIGAIGAQGSWYDSAPSFNTLESTFIRGKHLFDFITRLSIYTGRSSFSASNYLKKWIGHQISSQPIGGSIQTQTYGTTSGSSVIATQQIGFTGFDVYKTLSTAGVLFAYTSKYYGVSKVVFDAIYPDNKYKTTFTYNPGSEGIAAQEKDSEVELPPETLDQPNYEAYSHRLNYVTFIRNPDVPVFSWTHRSADRTNTVYSDKITQIPVVKASDGPKPFVNEVGHYLGGEPISFISSGSTGVIRLNINSPLSQKYRVRIRYCSSVDFDLDVVRGGTTVNNGRFNKSAPNVGWQSLKYENFKFASFSTPFTFNQAQDTLKISVRNFSSIVGGSVVYIDRIELIPVNATYEAEQDLDSAKKAVNTLFTNTKDGLRPGVTDYEVNQAANLVECLSDDLYPNEKRLLFDAVKEAKRLSEARNLLQDPDFQEINGENGWTASTGIEVVERDALFKGRYLRLPGAREMDTETYPTYLYQKVEEGVLKPYTRYRLRGFVGSSQGLEISTIRHQTNRIVKNVPDDLLPDVPPVNSDGRINRCSEQKYVNSRLEGERGLPNGNRSAEAHEFSLPIDIGELDYNENAGIWVGFKITDPEGYATLGNLELIEEGPLSGDALERLQREEQQWKLQMTKRREETDRKYTAAKQAVDRLYADYQDQQLNPNVEITDITAAQHLIQSIPYVYNEMFPEIQGMNYTKYTELTNRLQQAWGLYDQRNAIPNGDFRNELSNWNTTSGVNVQQINNTSVLVMPNWDGQVSQQFTVQPNQRYVLRVTARKEGVGNGYVSIRDGGNQTETLTFSASDYNTDSVYNTQVSNTNGLYNEQTGYTTKTVTFIPYTDQVWIEMSETEGMFYIESVELIVDVE

SEQ ID NO: 485 - protein, 1174 aa, Bacillus thuringiensis 185
MSPNNQNEYEIIDMAPSTSVTNDSNRYPFANEPTNALQNMNYKDYLRMSEGYSPEYLTSLSPYSQFGTVDKIISIISLLNSAAGIPGLDFFTGLLQFILDFFAPEDPWAELMELVEQLIDQKITVATREKALAELRGLINGYLVYQQSLESWLENPNATRASIVREQYVALELDFVTSISSFAIAGQEVPLLAVYAQAANLHLLLLRDVSIFGEEWGLTVNEVNTFYIRQMTYTTEYSDYCVRIYNTGLNKLKGSSASSWVDYNRFRREMNLLVLDIIALFPNYDVRRYPMETTTELTRVVYTDPIVFDERKGVASTHSWTAIAPSFSSIESLTRRPGLFTWLDQLTIFSKRISQPSVFINSWAGHKISTFRTQKTDILINTTHGDTNNPIKEFVVDTKKVEDIYQTIAYPHAVANEVFYLFGVPKVDFNMVPAGGSANSAHTLIFSDSTGGRLESITKNSEAELPPTESLSDTPQPNQVTYSHRLDYATIIKANKSYGSGYIPLLGWTHRSVDRNNTIYPNKITQIPAVKAFSYTESFNVNVIAGPGFTGGDLISLGHLENIYMKLNVPNPQKFRVRIRYAASTTSYLQITGLSNLAQSDRFEQTYSNENENNLMFENFQYVELRNIFSVDAPLENHQVSIQNYQGNGFVIIDRIEFIPVNATYEAEQDLDSAKKAVNTLFTNTKDGLRPGVTDYEVNQAANLVECLSDDLYPNEKRLLFDAVKEAKRLSEARNLLQDPDFQEINGENGWTASTGIEVVEGDALFKGRYLRLPGAREMDTETYPTYLYQKVEEGVLKPYTRYRLRGFVGSSQGLEISTIRHQTNRIVKNVPDDLLPDVPPVNSDGRINRCSEQKYVNSRLEGERGLPNGNRSAEAHEFSLPIDIGELDYNENAGIWVGFKITDPEGYATLGNLELVEEGPLSGDALERLQREEQQWKLQMTKRREETDRKYTAAKQAVDRLYADYQDQQLNPNVEITDITAAQNLIQSIPYVYNEMFPEIQGMNYTKYTELTNRLQQAWGLYDQRNAIPNGDFRNELSNWNTTSGVNVQQINNTSVLVMPNWDGQVSQQFTVQPNQRYVLRVTARKEGVGNGYVSIRDGGNQTETLTFSASDYNTDSVYNTQVSNTNGLYNEQTGYTTKTVTFIPYTDQVWIEMSETEGMFYIESVELIVDVE

SEQ ID NO: 486 - protein, 1174 aa, Bacillus thuringiensis DLL
MSPNNQNEYEIIDMAPSTSVTNDSNRYPFANEPTNALQNMNYKDYLRMSEGYSPEYLTSLSPYSQFGTVDKIISIISLLNSAAGIPGLDFFTGLLQFILDFFAPEDPWAELMELVEQLIDQKITVATREKALAELRGLINGYLVYQQSLESWLENPNATRASIVREQYVALELDFVTSISSFAIAGQEVPLLAVYAQAANLHLLLLRDVSIFGEEWGLTVNEVNTFYIRQMTYTTEYSDYCVRIYNTGLNKLKGSSASSWVDYNRFRREMNLLVLDIIALFPNYDVRRYPMETTTELTRVVYTDPIVFDERKGVASTHSWTAIAPSFSSIESLTRRPGLFTWLDQLTIFSKRISQPSVFINSWAGHKISTFRTQKTDILINTTHGDTNNPIKEFVVDTKKVEDIYQTIAYPHAVANEVFYLFGVPKVDFNMVPAGGSANSAHTLIFSNSTGGRLESITKNSEAELPPTESLSDTPQPNQVTYSHRLDYATIIKANKSYGSGYIPLLGWTHRSVDRNNTIYPNKITQIPAVKAFSYTESFNVNVIAGPGFTGGDLISLGHLENIYMKLNVPNPQKFRVRIRYAASTTSYLQITGLSNLAQSDRFEQTYSNENENNLMFENFQYVELRNIFSVDAPLENHQVSIQNYQGNGFVIIDRIEFIPVNATYEAEQDLDSAKKAVNTLFTNTKDGLRPGVTDYEVNQAANLVECLSDDLYPNEKRLLFDAVKEAKRLSEARNLLQDPDFQEINGENGWTASTGIEVVEGDALFKGRYLRLPGAREMDTETYPTYLYQKVEEGVLKPYTRYRLRGFVGGSQGLEISTIRHQTNRIVKNVPDDLLPDVPPVNSDGRINRCSEQKYVNSRLEGERGLPNGNRSAEAHEFSLPIDIGELDYNENAGIWVGFKITDPEGYATLGNLELVEEGPLSGDALERLQREEQQWKLQMTKRREETDRKYTAAKQAVDRLYADYQDQQLNPNVEITDITAAQNLIQSIPYVYNEMFPEIQGMNYTKYTELTNRLQQAWGLYDQRNAIPNGDFRNELSNWNTTSGVNVQQINNTSVLVMPNWDGQVSQQFTVQPNQRYVLRVTARKEGVGNGYVSIRDGGNQTETLTFSASDYNTDSVYNTQVSNTNGLYNEQTGYTTKTVTFIPYTDQVWIEMSETEGMFYIESVELIVDVE

SEQ ID NO: 487 - protein, 1174 aa, Bacillus thuringiensis L-27
MSPNNQNEYEIIAYGTSTSVTNDSNRYPFANEPTNALQNMNYKDYLRMSEGYSPEYLTSLSPYSQFGTVDKIISIISLLNSAAGIPGLDFFTGLLQFILDFFAPEDPWAELMELVEQLIDQKITVATREKALAELRGLINGYLVYQQSLESWLENPNATRASIVREQYVALELDFVTSISSFAIAGQEVPLLAVYAQAANLHLLLLRDVSIFGEEWGLTVNEVNTFYIRQMTYTTEYSDYCVRIYNTGLNKLKGSSASSWVDYNRFRREMNLLVLDIIALFPNYDVRRYPMETTTELTRVVYTDPIVFDERKGVASTHSWTAIAPSFSSIESLTRRPGLFTWLDQLTIFSKRISQPSVFINSWAGHKISTFSTQKTDILINTTHGDTNNPIKEFVVDTKKVEDIYQTIAYPHAVANEVFYLFGVPKVDFNMVPAGGSANSAHTLIFSDSTGGRLESITKNSEAELPPTESLSDTPQPNQVTYSHRLDYATIIKANKSYGSGYIPLLGWTHRSVDRNNTIYPNKITQIPAVKAFSYTESFNVNVIAGPGFTGGDLISLGHLENIYMKLNVPNPQKFRVRIRYAASTTSYLQITGLSNLAQSDRFEQTYSNENENNLMFENFQYVELRNIFSVDAPLENHQVSIQNYQGNGFVIIDRIEFIPVNATYEAEQDLDSAKKAVNTLFTNTKDGLRPGVTDYEVNQAANLVECLSDDLYPNEKRLLFDAVKEAKRLSEARNLLQDPDFQEINGENGWTASTGIEVVEGDALFKGRYLRLPGAREMDTETYPTYLYQKVEEGVLKPYTRYRLRGFVGSSQGLEISTIRHQTNRIVKNVPDDLLPDVPPVNSDGRINRCSEQKYVNSRLEGERGLPNGNRSAEAHEFSLPIDIGELDYNENAGIWVGFKITDPEGYATLGNLELVEEGPLSGDALERLQREEQQWKLQMTKRREETDRKYTAAKQAVDRLYADYQDQQLNPNVEITDITAAQNLIQSIPYVYNEMFPEIQGMNYTKYTELTNRLQQAWGLYDQRNAIPNGDFRNELSNWNTTSGVNVQQINNTSVLVMPNWDGQVSQQFTVQPNQRYVLRVTARKEGVGNGYVSIRDGGNQTETLTFSASDYNTDSVYNTQVSNTNGLYNEQTGYTTKTVTFIPYTDQVWIEMSETEGMFYIESVELIVDVE

SEQ ID NO: 488 - protein, 1157 aa, Bacillus thuringiensis HBF-18
MSPNNQNEYEIIDASSPTSVSNNSVKYPLASDQTTTLQNMNYKDYLRMSEGENPELFGNPETFISAQDAVGTGIDIVSKLLGSLGVPLVGQAATALKWIIGKLWPSSGNPWDDLMTAVEELINQKIEAYARSKALAELGVSGRAVKSYQTALEEWQKNPNNARSAALVRERFSDAEHTLRTQMSLFTVRGYEIPLLATYAQAANLHLFVMKDIQIYGREWGYTQGDINLFYREQVEFTGEYSDYCVKWYNAGLDKLRGSTALQWINYNRFRREMTVMALDIVALFPNYDIRMYPMKTTAELTRRIYTDPLGYTGSGSNTPPWYNYGYSFSWIENNAVPAPGLFQWLQGIGIYTKFARITPFYANYWSGHTVFYKFTNDSTERRVQYGDTDTPELDSSSFENVDIYKVSASVGSYKSNTVLLPTFKATFEGVNQNNQLKTFRYQKESNVPSQTKNSTTELPVQLSTPPTYGDSEQYSHRLAYVFDAPIDSYTGIYRMYGFAPILGWTHISVSRDNRIDPDKITQIPAVKAYAEGLANYIKDPGFTGGDLLALGRNSNTSLIVNFSKPQTYRIRIRYAASKTSYFQLRGLHNIAQSQRFEATYSNKNENDLTFNDFKYVEIQKTVSIDNPSESRSISIYTQSDTELLIIDKIEFIPVDATFEAEQDLDVAKKAVNGLFTNTKDALQTSVTGYQGNQAGKLSRMPIDELYPNEKRMLWDAVKEAKRLVQARNLLQDTGFNVINGENGWTGSTGIEVVEGDVLFKDRSLRLPSAREIDTETYPTYLYQQIDESLLKPYTRYRLRGFIGSSQDLEIKLIRHRANQIVKNVPDNLLPDVRPVNSCGGVDRCSEQQYVDANLALENNGENRNMSSDSHAFSFHMDTGEIDLNENTGIWVVFKIPTTNGYATLGNLELVEEGPLSGDALERLQREEQQWKLQRTKRREETDRKYMAAKQAIDRLFADYQDQQLNSGVEMSDLLAAQNLVQSIPYVYNEMFPEIPGMNYTNFTELTNRLQQAWNLYDLRNAIPNGDFRNGLSDWNATSDINVQQLNDTSVLVIPNWNSQVSQQFTVQPNYRYVLRVTARKEGAGDGYVIIRDGTNQTETLAFNTCDNDAGVLSTNQASYITKTVEFTPSTEQVWIDMSETEGVFNIESVELVLEEE

SEQ ID NO: 489 - protein, 1157 aa, Bacillus thuringiensis 145
MSPNNQNEYEIIDASSPTSVSNNSVKYPLASDQTTTLQNMNYKDYLRMSEGENPELFGNPETFISAQDAVGTGIDIVSKLLGSLGVPLVGQAATALKWIIGKLWPSSGNPWDDLMTAVEELINQKIEAYARSKALAELGVSGRAVKSYQTALEEWQKNPNNARSAALVRERFSDAEHTLRTQMSLFTVRGYEIPLLATYAQAANLHLFVMKDIQIYGREWGYTQGDINLFYREQVEFTGEYSDYCVKWYNAGLDKLRGSTALQWINYNRFRREMTVMALDIVALFPNYDIRMYPMKTTAELTRRIYTDPLGYTGSGSNTPPWYNYGYSFSWIENNAMPAPGLFQWLQGIGIYTKFARITPFYANYWSGHTVFYKFTNDSTERRVQYGDTDTPELDSSSFENVDIYKVSASVGSYKSNTVLLPTFKATFEGVNQNNQLKTFRYQKESNVPSQTKNSTTELPVQLSTPPTYGDSEQYSHRLAYVFDAPIDSYTGIYRMYGFAPILGWTHISVSRDNRIDPDKITQIPAVKAYAEGLANYIKDPGFTGGDLLALGRNSNTSLIVNFSKPQTYRIRIRYAASKTSYFQLRGLHNIAQSQRFEATYSNKNENDLTFNDFKYVEIQKTVSIDNPSESRSISIYTQSDTELLIIDKIEFIPVDATFEAEQDLDVAKKAVNGLFTNTKDALQTSVTDYQVNQAANLVECLSDELYPNEKRMLWDAVKEAKRLVQARNLLQDTGFNVINGENGWTGSTGIEVVEGDVLFKDRSLRLPSAREIDTETYPTYLYQQIDESLLKPYTRYRLRGFIGSSQDLEIKLIRHRANQIVKNVPDNLLPDVRPVNSCGGVDRCSEQQYVDANLALENNGENRNMSSDSHAFSFHMDTGEIDLNENTGIWVVFKIPTTNGYATLGNLELVEEGPLSGDALERLQREEQQWKLQRTKRREETDRKYMAAKQAIDRLFADYQDQQLNSGVEMSDLLAAQNLVQSIPYVYNEMFPEIPGMNYTNFTELTNRLQQAWNLYDLRNAIPNGDFRNGLSDWNATSDINVQQLNDTSVLVIPNWNSQVSQQFTVQPNYRYVLRVTARKEGAGDGYVIIRDGTNQTETLAFNTCDNDAGVLSTNQASYITKTVEFTPSTEQVWIDMSETEGVFNIESVELVLEEE

SEQ ID NO: 490 - protein, 1157 aa, Bacillus thuringiensis FCD114; identical to SEQ ID NO: 489

SEQ ID NO: 491 - protein, 1199 aa, Bacillus thuringiensis 185
MSPNNQNEYEIIDTPSRTSVSNDSVRYPFASDPTTDLNNMNYKDFLKTVNGYNTGDLSGSEAFISQTAINTAGKAVGTVLGLLGVPLAGAVGPLISFYGAVALLFWGPGDPWQAFMTQVEALVNQKIADYARNKAIAELQGLRNILDLYRLALIEWEENPTRTRSLTNIRLKFEDVNQFFEYQMPSFAVGGYEVPLLAVYAQAANLHLSVLRDAAIFGEQWGMSQTAINNIYDLQQRRTAEYINHCVKWYNNGLDKLRGSNAGQWVNFNRYRREMTLMVLDIVAIFPNYDTRTYPSGIGTSVQLTREVYTDPIGATSTQGGVSWYDDAPSFTAIESSVVRPLHLFDLLTGVTVYAASSSWDSSHYFRFWNGHKVDTKGIKSSVQYSNVYGSTSNAVSTTIIPFSGFDVYRVFSLAGVLFAWTTRYFGAPEVYFQRVDHNSGIDVGYDIAFSERYAGIGEQQKDSLDELPLQTEGPAYRSYSHRLNHISMVPQTVRTRNVPVFSWSHRSADIDNRIFQDRINQIPVVKGHTLGPGASVMAGPGFTGGNIVTRTSPGVVVFSGVTIKNALSQRYRVRIRYASTTDFRFFSTLSGTRLYATQATKTMNKGQQLTYESFQYATIGSTFTFENVNDSLTIGADQFLSGEQVYVDRYEVIPVDATFEAENDLEVAKKAVNNLFTNAKDALQTDVTDYQVNQAANLVECLSSELYPNEKRLLFDAVKEAKRLDQARNLLQDTQFNEMNGENGWNGSTGVEIVEDDVFFKDRSIRLSSAREAGTENSPTYLYQKIDESRLKPYTRYSLRGFVRSSQNLEIYVTRYQTQRVVKNIVDNFLPDMYAVNACGGIDRCGEQKHVNTMLGLENNVPNGNTVSDSHEFSIPVDTGELNYNEDTGIWVVFKITTTDGYATLGNLELVEEGPLSGETLERVKNQGKQWQDQMARRRAETDTRYGTAKQAIDRLFVDYQDQQLSPSIEISDLTAAQNLVQSIPYVYNDTLPEIPGMNYTSVTELTNRLQQAWNLYDLRNSIQNGDFRNDVSNWNVTPGVNIQQMNHTSVLVIPNWDSQASQQITVQPNRRYVLRVTARKEGSGDGYVTIRDGAKYTETLTFNTCDYNGSSVYQEQALYTNDVYNTQSVNIQGSNSAYHTQATNTDRYNMNGMYNDQTSYVTKTVEFIPYTEQVWIEMSETEGVFYIESVELIVEEM

SEQ ID NO: 492 - protein, 1194 aa, Bacillus thuringiensis su4
MSPNNQNEFDIIDVPSNISVSNSFVRYPFANDPNRTLQNTNYKDFLTMSEKSNSGYLTDPEAFDDVGSAIFAGLSITAKIMDAFDVPGGDIFNGLLEIIGILWDLQDDTWEAFMEQVEVLIDQKIAEYARNLALTNLKGLENSYKLYLEALADWKQNPTSPSSQERVRTRFRDTDDSLTVFMPSFAVKGYEVPLLAVYAQAANLHLLLLRDSVAYGLGWGLSQLNVNDNYNRQVRLTGEYTNHCVSWYTTGLEKLRGSNAQSWIKFNRYRREMTVMVLDIVALFPNYDARRYPQATTTELTRLIYTDPHGYTIYSPTSQTTIPWYEYGQSFSEIENVAIQAPRLFRWAQEMQIYTKFVRHAPQESHYWSAHTFSFHHTRDNTKTTLTYGDTSDPISVGTADLSDLDIYKVSSLVASSWGSGVRLLVTKAKFEVIYTFNQLWEFNYEPPGISNFFNQWKNTDTELPIQIVDPPTFGDPNQYSHRVAYISHAPIQPYSGAFRNYGLVPVFGWSHVSVDRNNTLYADRITQIPAVKAVQLSGEPYPVVRGPGFTGGDIARLPNNPNVGLLFNSKVESPSENKRYRVRIRYACASGARAIFGGLYLPITVQFNQTMSTTTPTRYEDFQYVDVSGSFILGNTNVSFSLVPQSANQTNNLFIDKIEFIPENPALEAESDLEAAKKAVNALFTNSKDTLQIGVTDYQINQAANLIECVSDEVYPNEKRLLFDAVKEAKRLSTARNLLEDTDFHTINGGNGWTGSTGIEIVEGDILFKDRSLRLPSAREIERETYPTYIYQKIEESRLKPNTRYSLRGFIGSSQDLEIYVLRHQAYRVIKNVSDNLLPNMRPINACGGVDRCSQQKYVNNSLEVNSGLSNGIGAADSHEFSIHVDTGELNYNEDMGIGVVFKITTTDGYATVGNIELVEVETLSGEALERVQRQEKQWQGQLATRRKETETRYGPAKQAIDRLFVDFQDQQLSRSTEISDLTEAQNLVQSIPYVYNDMLPEIPGMNYTSVTELTNRLQQAWNLYDQRNSIQNGDFRNDVSNWNVTTEVNIQQMNDTSVLVIPNWDSQVSQQITVQPNRRYVLRVTARKEGNGDGYVTIRDGANHTETLTFNTCDYDGNSVYNNQPLNANNNVYTTKSSNTNSYHTNGVYHDQTSYVTKTMEFTPYTEQVWVEMSETEGVFYIDSVELIVEEM

SEQ ID NO: 493 - protein, 1162 aa, Bacillus thuringiensis FPT-2
MSPNNQNEYEIIDMAPSTSVSNDSNRYPFASDPTNALQNMNYKEYLRMSEGYDSEYSGSPEVLISERDAVKTAISLVGTILGKLGVPLVGPIVSLYSTLIDVLWPGGKSQWEIFMEQVEALINQKIAEYARAKALAELEGLGNNYQLYLTALEEWQENPSSTRVLRDVRNRFEILDSLFTQYMPSFRVTGYEVPLLSVYAQAANLHLLLLKDASIFGEEWGFSTTAINNYYNRQMSLIAQYSDHCVQWYRTGLDRLKGSNAKQWVEYNRFRREMTLSVLDIMTLFPMYDMRTYPMETKAQLTREVYTDPIGAIGAQGSWYDSAPSFNTLESTFIRGKHLFDFITRLSIYTGRSSFSASNYLKKWIGHQISSQPIGGSIQTQTYGTTSGSSVIATQQIGFTGFDVYKTLSTAGVLFAYTSKYYGVSKVVFDAIYPDNKYKTTFTYNPGSEGIGAQEKDSEVELPPETLDQPNYEAYSHRLNYVTFIRNPDVPVFSWTHRSADRTASRNNFIYATKISQIPINKASRTSGGAVWNFQEGLYNGGPVMKLSGSGSQVINLRVATDAKGASQRYRIRIRYASDRAGKFTISSRSPENPATYSASIAYTNTMSTNASLTYSTFAYAESGPINLGISGSSRTFDISITKEAGAANLYIDRIEFIPVNTLFEAEEDLDVAKKAVNGLFTNEKDALQTSVTDYQVNQAANLIECLSDELYPNEKRMLWDAVKEAKRLVQARNLLQDTGFNRINGENGWTGSTGIEVVEGDVLFKDRSLRLTNAREIDTETYPTYLYQQIDESLLKPCTRYKLKGFIGSSQDLEIKLIRHRANQIVKNVPDNLLPDVRPVNSCGGVDRCSEQQYVDANLALENNGENGNMSFDSHAFSFHIDTGEIDLNENTGIWIVFKIPTTNGNATLGNLEFVEEGPLSGETLEWAQQQEQQWQDKMARKRAASEKTYYAAKQAIDRLFADYQDQKLNSGVEMSDLLAAQNLVQSIPYVYNDALPEIPGMNYTSFTELTNRLQQAWNLYDLQNAIPNGDFRNGLSNWNATSDVNVQQLSDTSVLVIPNWNSQVSQQFTVQPNYRYVLCVTARKEGVGDGYVIIRDGANQTETLTFNICDDDTGVLSTDQTSYITKTVEFTPSTEQVWIDMSETEGVFNIESVELVLEEE

SEQ ID NO: 494 - protein, 903 aa, Bacillus thuringiensis
MSPNNLNEYEIIDATPSTSVSNDSTRYPYANEPTNALQNMNYKDYLRMSEGYDNKYFANPEVFAAPGGITTGITIVTKLLGWLGLPFAGETGMALNFILGLLWPTSGNPWAELMILVEELINQKIEETVRNKALADLGNSGRALRSYLNAFEDWQKNPNIFRSKELVKERFSNAEHSLRTEMSSFAIRGFEIPLLATYAQAANLHLFLIKDIQIYGKEWGYTQADIDLFYREQVEFTKEYTEHCINIYNDGLNQLKGSNAKQWIAFNRFRREMTLTVLDVVALFPNYDVRMYPIKTTTELTRTIYTDPLGYTKTGSSSTPPWYNYGSSFSYIESVAIPAPSLVKWLSQIEIYSKSARATPQSADYWAGHTITYHYSGDDGQAVPNYGDRTNPVIVNRYNFEQADIYRVSSSVASSTTSGVKLLTTKAIFDGISTNNGLVSYMYEKLSNFFNELKDTITELPVQISSPPTYGDAEQYSHRLSYVSNAPTEYSSGGHLILGLIPVLGWTHTSLTQTNQIHSDSITQIPAVKANSVSSYVTVEKGTGFTGGDLVKFSTGFMSTGIQFNLKIEERKRYRIRIRYAADVNATLSALGLNDAFINIKSTMSQDTPLKYNDFQYAEADKTVHLYNPRFSLYLENSDQSGKSIYIDRIEFIPVDETYEAEQDLENAKKAVNALFTNTKDGLRPGVTDYEVNQAANLVECLSDDLYPNEKRLLFDAVREAKRLSEARNLLQDPDFQEINGENGWTASTGIEVVEGDALFKGRYLRLPGARQIDTETYPTYLYQKIDEGVLKPYTRYRLRGFVGRSQGLEIYTIRHQTNRIVKNVPDNLLPDASPGNAGDGINRCSEQKYVNSRLEGEKGLPNGSRSAEAHEFSIPIDTGEIDYNENAGIWVGFKITDPEQKQ

SEQ ID NO: 495 - protein, 1173 aa, Bacillus thuringiensis kenyae
MSPNNQNEYEIIDATPSTSVSNDSTRYPYANEPTNALQNMNYKDYLRMSEGYDNKYFANPEVFAAPGGITTGITIVTKLLGWLGLPFAGETGMALNFILGLLWPTSGNPWAELMILVEELINQKIEEAVRNKALADLANSGRALQSYLNAFEDWQKNPNIFRSKELVRERFANAEHSLRTEMSSFAIRGFEIPLLATYAQAANLHLFLIKDVQIYGKEWGYTQADIDLFYREQVEFTKEYTEHCINIYNDGLNQLKGSNAKQWIAFNRFRREMTLTVLDVVALFPNYDVRMYPIKTTTELTRTIYTDPLGYTKTGSSSTPPWYNYGSSFSYIESVAIPAPSLVKWLSQIEIYSKSARATPQSADYWAGHTITYHYSGNNDQVVANYGDRTNPVIVNRYNFEQADIYRVSSSVASSTTSGVKLLTTKAIFDGISTNNGLVSYMYEKLSNFFNELKDTITELPVQVSSSPTYGDAEQYSHRLSYVSNAPTEYSSGGHLILGLIPVLGWTHTSLTQTNQIHSDSITQIPAVKANSVSSYVTVEKGTGFTGGDLVKFSTGFMSTGIQFNLKIEERKRYRIRIRYAADVNARLSANHFGTTFINIKSTMSQDTPLKYNDFQYAETDGTLTLQDSHFSLFLEDSDQSGKSIYIDRIEFIPVDETYEAEQDLENAKKAVNALFTNTKDGLRPGVTDYEVNQAANLVECLSDDLYPNEKRLLFDAVREAKRLSEARNLLQDPDFQEINGENGWTASTGIEVVEGDALFKGRYLRLPGARQIDTETYPTYLYQKIDEGVLKPYTRYRLRGFVGRSQGLEIYTIRHQTNRIVKNVPDNLLPDASPGNAGDGINRCSEQKYVNSRLEGEKGLPNGSRSAEAHEFSIPIDTGEIDYNENAGIWVGFKITDPEGYATLGNLELVEEGPLSGDALERLQREEQQWKIQMTKRREETDRKYMIAKQAVDRLYADYQDQQLNPNVEITDITAAQNVIQSIPYVYNDAFPGLPGMNYTKFTELTDRLQQAWSLYDQRNAIPNGDFRNELSNWNTTAGVNVQQLNGTSVLVIPNWDAQVSQQFTVQPNQRYVLRVTARKEGVGNGYVSIRDGGNQTETLTFSASDYDTNGVYNIQASNTNGYNTNGVYNDQTGYITKTAEFIPHTNQVWIEMSETEGTFYIESVELIVDVE

SEQ ID NO: 496 - protein, 1157 aa, Bacillus thuringiensis
MSPNNQNEYEIIDMAPSTSVTNDSNRYPFANEPTNALQNMNYKDYLRMSEGYSPEYLTSLSPYSQFGTVDKIISIISLLNSAAGIPGLDFFTGLLQFILDFFAPEDPWAELMELVEQLIDQKITVATREKALAELRGLINGYLVYQQSLESWLENPNATRASIVREQYVALELDFVTSISSFAIAGQEVPLLAVYAQAANLHLLLLRDVSIFGEEWGLTVNEVNTFYIRQMTYTTEYSDYCVRIYNTGLNKLKGSSASSWVDYNRFRREMNLLVLDIIALFPNYDVRRYPMDTTTELTRVVYTDPIVFDERKGVASTHSWTAIAPSFSSIESLTRRPGLFTWLDQLTIFSKRISQPSVFINSWAGHKISTFRTQKTDILINTTHGDTNNPIKEFVVDTKKVEDIYQTIAYPHAVANEVFYLFGVPKVDFNMVPAGGSANSAHTLIFSDSTGGRLESITKNSEAELPPTESLSDTPQPNQVTYSHRLDYATIIKANKSYGSGYIPLLGWTHRSVDRQQTIYPQKITQIPAVKAFSYTESFNVNVIAGPGFTGGDLISLGHLENIYMKLNVPNPQKFRVRIRYAASTTSYLQITGLSNLAQSDRFEQTYSNENENNLMFENFQYVELRNIFSVDAPLENHQVSIQNYQGNGFVIIDRIEFIPVNATYDAENEAVNTTFTEGRNALQKYVTDYKVDQVDILVDCISGDLYPNEKRELQLLVKYAKRLSYSRNLLLDPTFDSINSSEENGWYGSNGIVIGNGDFVQKGNYLIFSGTNDTQYPTYLYQKIDESKLKEYSRYKLKGFIESSQDLEAYVRRYDAKHRTLDVSDNLLPDILPENTCGEPSRCAAQQYLDENPSSECSSMQDGILSDSHSFSLNIDTGSGNHNENLGIWVLFKISTLEGYAKFGNLEVIEDGPVIGEALARVKRQTTKWRNKLAQMTTETQAIYTRAKQALLNLFANAQDSHLKIDVTFAEIAAARKIVQSIREVYMSWLSVVPGVNHPIMTELSGRVQRAFQLYDVRNVVRNGRFLNGLSDWIVTSDVNVQEENGNMVLVLNNWDAQVLRNVKLYQDRGYVLRVTARKIGIEEGYITITDEEGHTDQLRFTACEEIDASNYFISGYITKELEFFPDTEKVHIEIGETEGEFLVESIELFLMEELC

SEQ ID NO: 497 - protein, 1121 aa, BGSC 4CC1
MEGGNNQGFINIEGRLSLEQVLAVSAGVASYILSNLGPFGVFFSYIIGAFWPTAPSDTRVWEAFMELIEARIDQKIQESTRKDAIARLQGLGAASEVYQESLESWLENQNDARAMSVVRQQFVAFELDFVTAMPFFERSGDEILLLAVYAQAANLHLLLLRDASLYGADWGMEPYDIANYYNRQKERTATYSNHCMEWYKKGLDELWSAGGYGGDVWQDYNDFRREMTLSVLDFVALFPNYDTHLYPIEVKGELTREIYTPGINIDIDRGRLGKVTLENALVNSPRLFSWLKEIQLFTNINFNPRWKFLSATRIGYKLTGYRSVNFEPYEGFYFEGLFQSNFTLNDYQEIYIVDVTRFGSLYDTPTAITAMTFFKDDNTTFNYSSNTPSGEPMITSGFYLPGIDGSEEPTSNNFSHRLSTINTYNTTNQTFYHTFGWTHVSVDRNNTIVSNKITQIPFVKANTGNVVRGPGHTGGDLVVFKPAARPDIVLRVGNTRLQSYRVRVRYASNADISLELDTTYEKTNIHLQKTFNSSEAEDLTYDNFQYAEADNIVWLGQDLSQYIEFQNAITNDSTAIAYFERVEFLPVGATYEAEQDLETAKKVVNALFTNTKNALQMSVTDYEVTQAANLVECVSDELFPNEKRLLFDAVKEAKRLSGIRNLLQDSDFQEINGENGWVGSIEIEIREGDTLFKGYSLRLPSAREIYMEMFPTYLHQKIEESRLKPYTRYRLRGFVSSSQDLEIFSIRHETNRIVKNVSDDLLPNLSSYYTCGGVNRCSTQKYVYNRLEFQNSLSSGNRYSDAHSFSIPIDTGKIDLNDNTGIWIAFKLATTGGYATLGNLELVEEAPLIGDTLERVQREDQQWKSQMTRKREEAERKYMAAKQAIDRLYADYQDHQLNPNVEITDITATQHLVQSLPYVNNDVLQEIPGMNYTRFTELTNRLQQAWELYGLRNMIANGDFRNGLNDWDATSGVNIQQINHTSVLVISNWDAQISKQFTVQPNQKYVLRVTVRKEGSGDGYVTIRDGGNHTETLTFNTCDYERSNVYNEKVFQSNDYGTNNVYHTQTTNANRYTTNSLYNDGTGYVTKTVEFIPYTEQVWIEMSETEGVFYVESIEFILEEV

SEQ ID NO: 498 - protein, 1173 aa, BtQ52-7
MSPNNQNEYEIIDASSPTSVSNNSVKYPLASDQTTTLQNMNYKDYLRMTERENPELSRNPETFISAQDAVGTGIDIVSTIISGVGIPVVGEVLSILGAILGLFWPSSGEDVWELFMERVEELIDQKIGTFAKDTAISNLGKSRIAVTSYRNALEAWQKNPNNARSISLVRERFADAEHTLRTNMSSFVISGYQIPFLATYAQAANLHLLVMKDVQIYGIQWGYTQGEIDLFYREQADFTAQYSDYCVKWYNAGLDKLRGTSAQQWVNYDRFRREMTVMALDIVALFPNYDVRMYPMQTNAELTREIYTPVGTFVTEAGSSFRRVISWHDMSTPNFPSFSTIENIVVRAPHMFRVLRELEISSMRRNNGSIEFYNYWSGQMTGHSNINNYSKISRVSGGDLTNDTTNVPLNNRNIYRAIWNYIGRVENSLLGVNPVDFFFTNNTRFTYNRPRSILWGGAGELRIDSGEELPFKSHTDYSHIVSSASSFPLFSNFGTRLGSVVTFGWTHSSVDLENTIHPDKITQIPAVKAFASSVTAEAVKGVGNTGGNLVRLYSGGLYTAITMRFKVAERKQYRVRIRYAANVNATLSLRNYTSTTNYTSTTINLTSTMNEKEPSSYNDFRYVEATRVISLNNHTEFRMIEESSSQIGGYIYIDKIEFIPVDATYEAEQDLDVAKKAVNGLFTNTKDALQTSITDYQVNQAANLVECLSDELYPNEKRMLWHAVKEAKRLVQARNLLQDTGFNVINGENGWTGSTGIEVVEGDVLFKDRSLRLPSAREIDTETYPTYLYQQIDESLLKPYTRYRLRGFIGSSQDLEIKLIRHRANQIVKNVPDNLLPDVRPVNSCGGVDRCSEQQYVDANLALENNGENRNMSSDSHAFSFHMDTGEIDLNENTGIWVVFKIPTTNGYATLGNLELVEEGPLSGEVLERAQQQEQQWQDKMVRKRTASEKANYAAKQAIDRLFADYQDQQLNSGVEMSDLLAAQNLIQSIPYVYNEMLPEIPGMNYTNFTELTNRLQQAWNLYDLRNAIPNGDFRNGLSDWNATSDINVQQLNDTSILVIPNWNSQVSQQFTVQPNYRYVLRVTARKEGVGDGYVSIRDGGNQTETLTFSASDYNTPASNTNGYNTNGVYNDQTGYITKTVTFIPYTDQVWIEMSETEGVFNIESVELVLEEE

SEQ ID NO: 499 - protein, 1204 aa, Bacillus thuringiensis R36
MSPNNQNEYEIIDTPSRTSVSNDSVRYPFANEPTTDLNNMNYKDYLRMSEVDDATFLSNPEAFIDSKSVQTIIGIVGKGLGVLGVPGAAAIAQFFSFLVGQLWPSTGEFIWEQIIEQVEALVDQKITDYARNKALSEVQGLGEAFAVYQQSLQTWQENRTDSRVRGVIIQQFIALDLDFVNKMPSFAVSGQEVPLLAVYALAANIHLLLLRDASLFGAEWGFATPEISDYYNRQIQLITKYTDYCVNWYNTGLGYMRKVDSTGSGNRQTRNWLRYHQFRREMTLMVLDVLALFPGYDIRTYPGNVHFQLTREVYTDPIVFNPSSKPSGKFCDPWESRYEYDYLSEMENVLVRPPHLFEIFVNNTYFTGRGTILFNDNEYINYMIGNKITYRYTNDDTRYERNYGSSSTETNSLIFGLSDEFDIFNISSVAANLANYYGNRYGFPYARWYCGSGLGGSGYNTFTYSRTHTTNQICTQSYDAQNELPPEGSQSQADYSHRLAHIASYTIPVKSGGGISGNIPLYAWTHRSASKFNYITPNRINHLPMVKSYILPTGTSVVQGPGFTGGNLLKRATSGQIAKLKVELINFGLSAQYRVRIRYASTSTLNFRVFQTGTLVNDLNFNRTMSRGESLTHNKFKFASFTTPFMFTSKFSELRIDVSNLSSGEEVYVDSIEVIPVNATYEAETNLEVAKKAVMSCLRMQRALQTDVTDYQVNQVANLIECVSDEVYPNEKRLLFDAVKEAKRLDQARNLLQDPNFQEINGENGWTGSTGIEIVEGDLPFKDRSLRLPSAREMERETYPTYIYQKIEESRLKPNTRYKFRGFIGSSQDLEIYVIRHQAYRVIKNVSNNLLPNMRPINACGGVDRCNEQKQVNTVLGLENNVPNGNTMSDSHEFSIPVDTGELNYNENPGIWVVFKITTTDGYATVGNIELVEEETLSGEALERVQQQEKRWQDQMARRRAETENRYGIAKQAIDRLFVDYSKVSSSIEISDLTAAQNLVQSIPYVYNEMLPEIPGMNYTSVTELTNRLQQAWNLYDQRNSIQNGDFRNDVRNWNVTPGVNIQQMNDTSVLVIPNWDSQVSQQITVQPNRRYVLRVTARKEGNGDGYVTIRDGANHTETLTFNTCDYDGSSVYDNQAFNANNDVYTTQSSNTNRYNTNGVYHDQTSYITKTVEFIPYTEQVWIEMSETEGVFYVESVELIVEEM

SEQ ID NO: 500 - protein, 802 aa, Bacillus thuringiensis
MNQNKHGIIGASNCGCASDDVAKYPLANNPYSSALNLNSCQNSSILNWINIIGDAAKEAVSIGTTIVSLITAPSLTGLISIVYDLIGKVLGGSSGQSISDLSICDLLSIIDLRVSQSVLNDGIADFNGSVLLYRNYLEALDSWNKNPNSASAEELRTRFRIADSEFDRILTRGSLTNGGSLARQNAQILLLPSFASAAFFHLLLLRDATRYGTNWGLYNATPFINYQSKLVELIELYTDYCVHWDNRGSTELRQRGPSATAWLEFHRYRREMTLMGLEIVASFSSLDITNYPIETDFQLSRVIYTDPIGFVHRSSLRGESWFSFVNRANFSDLENAIPNPRPSWFLNNMIISTGSLTLPVSPSTDRARVWYGSRDRISPANSQFITELISGQHTTATQTILGRNIFRVDSQACNLNDTTYGVNRAVFYHDASEGSQRSVYEGYIRTTGIDNPRVQNINTYLPGENSDIPTPEDYTHILSTTINLTGGLRQVASNRRSSLVMYGWTHKSLARNNTINPDRITQIPLTKVDTRGTGVSYVNDPGFIGGALLQRTDHGSLGVLRVQFPLHLRQQYRIRVRYASTTNIRLSVNGSFGTISQNLPSTMRLGEDLRYGSFAIREFNTSIRPTASPDQIRLTIEPSFIRQEVYVDRIEFIPVNPTREAKEDLEAAKKAVASLFTRTRDGLQVNVKDYQVDQAANLVSCLSDEQYGYDKKMLLEAVRAAKRLSRERNLLQDPDFNTINSTEENGWKASNGVTISEGGPFYKGRAIQLASARENYPTYIYQKVDASELKPYTRYRLDGFVK

SEQ ID NO: 501 - protein, 1156 aa, Bacillus thuringiensis galleriae
MNQNKHGIIGASNCGCASDDVAKYPLANNPYSSALNLNSCQNSSILNWINIIGDAAKEAVSIGTTIVSLITAPSLTGLISIVYDLIGKVLGGSSGQSISDLSICDLLSIIDLRVSQSVLNDGIADFNGSVLLYRNYLEALDSWNKNPNSASAEELRTRFRIADSEFDRILTRGSLTNGGSLARQNAQILLLPSFASAAFFHLLLLRDATRYGTNWGLYNATPFINYQSKLVELIELYTDYCVHWYNRGFNELRQRGTSATAWLEFHRYRREMTLMVLDIVASFSSLDITNYPIETDFQLSRVIYTDPIGFVHRSSLRGESWFSFVNRANFSDLENAIPNPRPSWFLNNMIISTGSLTLPVSPSTDRARVWYGSRDRISPANSQFITELISGQHTTATQTILGRNIFRVDSQACNLNDTTYGVNRAVFYHDASEGSQRSVYEGYIRTTGIDNPRVQNINTYLPGENSDIPTPEDYTHILSTTINLTGGLRQVASNRRSSLVMYGWTHKSLARNNTINPDRITQIPLTKVDTRGTGVSYVNDPGFIGGALLQRTDHGSLGVLRVQFPLHLRQQYRIRVRYASTTNIRLSVNGSFGTISQNLPSTMRLGEDLRYGSFAIREFNTSIRPTASPDQIRLTIEPSFIRQEVYVDRIEFIPVNPTREAKEDLEAAKKAVASLFTRTRDGLQVNVKDYQVDQAANLVSCLSDEQYGYDKKMLLEAVRAAKRLSRERNLLQDPDFNTINSTEENGWKASNGVTISEGGPFYKGRAIQLASARENYPTYIYQKVDASELKPYTRYRLDGFVKSSQDLEIDLIHHHKVHLVKNVPDNLVSDTYPDDSCSGINRCQEQQMVNAQLETEHHHPMDCCEAAQTHEFSSYIDTGDLNSSVDQGIWAIFKVRTTDGYATLGNLELVEVGPLSGESLEREQRDNTKWSAELGRKRAETDRVYQDAKQSINHLFVDYQDQQLNPEIGMADIMDAQNLVASISDVYSDAVLQIPGINYEIYTELSNRLQQASYLYTSRNAVQNGDFNNGLDSWNATAGASVQQDGNTHFLVLSHWDAQVSQQFRVQPNCKYVLRVTAEKVGGGDGYVTIRDDAHHTETLTFNACDYDINGTYVTDNTYLTKEVVFHPETQHMWVEVNETEGAFHIDSIEFVETEK

SEQ ID NO: 502 - protein, 1151 aa, Bacillus thuringiensis DSIR517
MNQNKHGIIGASNCGCASDDVAKYPLANNPYSSALNLNSCQNSSILNWINIIGDAAKEAVSIGTTIVSLITAPSLTGLISIVYDLIGKVLGGSSGQSISDLSICDLLSIIDLRVSQSVLNDGIADFNGSVLLYRNYLEALDSWNKNPNSASAEELRTRFRIADSEFDRILTRGSLTNGGSLARQNAQILLLPSFASAAFFHLLLLRDATRYGTNWGLYNATPFINYQSKLVELIELYTDYCVHWYNRGFNELRQRGTSATAWLEFHRYRREMTLMVLDIVASFSSLDITNYPIETDFQLSRVIYTDPIGFVHRSSLRGESWFSFVNRANFSDLENAIPNPRPSWFLNNMIISTGSLTLPVSPSTDRARVWYGSRDRISPANSQFITELISGQHTTATQTILGRNIFRVDSQACNLNDTTYGVNRAVFYHDASEGSQRSVYEGYIRTTGIDNPRVQNINTYLPGENSDIPTPEDYTHILSTTINLTGGLRQVASNRRSSLVMYGWTHKSLARNNTINPDRITQIPLTKVDTRGTGVSYVNDPGFIGGALLQRTDHGSLGVLRVQFPLHLRQQYRIRVRYASTTNIRLSVNGSFGTISQNLPSTMRLGEDLRYGSFAIREFNTSIRPTASPDQIRLTIEPSFIRQEVYVDRIEFIPVNPTREAKEDLEAAKKAVASLFTRTRDGLQVNVKDYQVDQAANLVSCLSDEQYGYDKKMLLEAVRAAKRLSRERNLLQDPDFNTINSTEENGWKASNGVTISEGGPFYKGRAIQLASARENYPTYIYQKVDASELKPYTRYRLDGFVKSSQDLEIDLIHHHKVHLVKNVPDNLVSDTYPDDSCSGINRCQEQQMVNAQLETEHHHPMDCCEAAQTHEFSSYIDTGDLNSSVDQGIWAIFKVRTTDGYATLGNLELVEVGPLSGESLEREQRDNTKWSAELGRKRAETDRVYQDAKQSINHLFVDYQDQQLNPEIGMADIMDAQNLVASISDVYSDAVLQIPGINYEIYTELSNRLQQASYLYTSRNAVQNGDFNNGLDSWNATAGASVQQDGNTHFLVLSHWDAQVSQQFRVQPNCKYVLRVTAEKVGGGDGYVTIRDDAHHTETLTFNACDYDINGTYVTDNTYLTKEVVFHPETQHMWVEVNETEGAFHIDSIEF

SEQ ID NO: 503 - protein, 1144 aa, Bacillus thuringiensis galleriae
VFELKTCIWHAFFLTKLSSYKDYLKMSEGDYIDSYINPGNVRTGLQTGIDIVAVVVGALGGPVGGILTGFLSTLFGFLWPSNDQAVWEAFIEQMEELIEQRISDQVVRTALDDLTGIQNYYNQYLIALKEWEERPNGVRANLVLQRFEILHALFVSSMPSFGSGPGSQRFQAQLLVVYAQAANLHLLLLADAEKYGARWGLRESQIGNLYFNELQTRTRDYTNHCVNAYNNGLAGLRGTSAESWLKYHQFRREATLMAMDLIALFPYYNTRRYPIAVNPQLTREVYTDPLGVPSEESSLFPELRCLRWQETSAMTFSNLENAIISSPHLFDTINNLMIYTGSFSVHLTNQLIEGWIGHSVTSSLLASGPTTVLRRNYGSTTSIVNYFSFNDRDVYQINTRSHTGLGFQNAPLFGITRAQFYPGGTYSVTQRNALTCEQNYNSIDELPSLDPNEPISRSYSHRLSHITSYLHRVLTIDGINIYSGNLPTYVWTHRDVDLTNTITADRITQLPLVKSFEIPAGTTVVRGPGFTGGDILRRTGVGTFGTIRVRTTAPLTQRYRIRFRFASTTNLFIGIRVGDRQVNYFDFGRTMNRGDELRYESFATREFTTDFNFRQPQELISVFANAFSAGQEVYFDRIEIIPVNPAREAKEDLEAAKKAVASLFTRTRDGLQVNVKDYQVDQAANLVSCLSDEQYGYDKKMLLEAVRAAKRLSRERNLLQDPDFNTINSTEENGWKASNGVTISEGGPFYKGRALQLASARENYPTYIYQKVDASELKPYTRYRSDGFVKSSQDLEIDLIHHHKVHLVKNVPDNLVSDTYPDDSCSGINRCQEQQMVNAQLETEHHHPMDCCEAAQTHEFSSYIDTGDLNSSVDQGIWAIFKVRTTDGYATLGNLELVEVGPLSGESLEREQRDNTKWSAELGRKRAETDRVYQDAKQSINHLFVDYQDQQLNPEIGMADIMDAQNLVASISDVYSDAVLQIPGINYEIYTELSNRLQQASYLYTSRNAVQNGDFNNGLDSWNATAGASVQQDGNTHFLVLSHWDAQVSQQFRVQPNCKYVLRVTAEKVGGGDGYVTIRDGAHHTETLTFNACDYDINGTYVTDNTYLTKEVIFYSHTEHMWVEVNETEGAFHIDSIEFVETEK

SEQ ID NO: 504 - protein, 1164 aa, Bacillus thuringiensis B-SC5
MNRNNQNEYEVIDTSTCGCPSGDVMQYPLANDPNAALQNMNYKEYLQMSEGDYIDSYINPGNVRTGLQTGIDIVAVVVGALGGPVGGILTGFLSTLFGFLWPSNDQAVWEAFIEQMEELIEQRISDQVVRTALDDLTGIQNYYNQYLIALKEWEERPNGVRANLVLQRFEILHALFVSSMPSFGSGPGSQRFQAQLLVVYAQAANLHLLLLADAEKYGARWGLRESQIELYFNELQTRTRDYTNHCVNAYNNGLAGLRGTSAESWLKYHQFRREATLMAMDLIALFPYYNTRRYPIAVNPQLTREVYTDPLGVPSEESSLFPELRCLRWQETSAMTFSNLENAIIRPPHLFDTINNLMIYTGSFRFTNNQLIEGWIGHSVTSSLLASGPTTVVRRNYGSTTSIVNYFSFNDRDVYQINTRSHTGLGFQNAPLFGITRAQFYPGGTYSVTQRNALTCEQNYNSIDELPSLDPNEPISRSYSHRLSHITSYLHRVLTIDGINIYSGNLPTYVWTHRDVDLTNTITADRITQLPLVKSFEIPAGTTVVRGPGFTGGDILRRTGVGTFGTIRVRTTAPLTQRYRIRFRFASTTNLFIGIRVGDRQVNYFDFGRTMNRGDELRYESFATREFTTDFNFRQPQELISVFANAFSAGQEVYFDRIEIIPVNPAREAKEDLEAAKKAVASLFTRTRDGLQVNVKDYQVDQAANLVSCLSDEQYGYDKKMLLEAVRAAKRLSRERNLLQDPDFNTINSTEENGWKASNGVTISEGGPFYKGRALQLASARENYPTYIYQKVDASELKPYTRYRLDGFVKSSQDLEIDLIHHHKVHLVKNVPDNLVSDTYPDDSCSGINRCQEQQMVNAQLETEHHHPMDCCEAAQTHEFSSYIDTGDLNSSVDQGIWAIFKVRTTDGYATLGNLELVEVGPLSGESLEREQRDNTKWSAELGRKRAETDRVYQDAKQSINHLFVDYQDQQLNPEIGMADIMDAQNLVASISDVYSDAVLQIPGINYEIYTELSNRLQQASYLYTSRNAVQNGDFNNGLDSWNATAGASVQQDGNTHFLVLSHWDAQVSQQFRVQPNCKYVLRVTAEKVGGGDGYVTIRDGAHHTETLTFNACDYDINGTYVTDNTYLTKEVIFYSHTEHMWVEVNETEGAFHIDSIEFVETEK

SEQ ID NO: 505 - protein, 1163 aa, Bacillus thuringiensis japonensis
MNRNNQNEYEVIDTSTCGCPSGDVMQYPLANDPNAALQNMNYKEYLQMYGGDYADAFINPGNVRTGLQTGIDIVALLVGTLGGAVGGILTGLLSTLFGFLWPSNDQAVWEAFIEQMEELIEQRISDQVVRTALDNLTGIQNYYNQYLLAFEEWEEAPNSVRSNLVLQRFENLHALFVSSMPSFGSGPGSQRFEAQLLLVYAQAANLHLLLLRDAEIYGARWGLRESQIQLYFDELQNNTRDYTNHCVNAYNNGLEQVRGTNAASWLKYHQFRRETTLTAMDLVALFPYYNLRQYPIAVNPQLTREVYTDPLGVPFEESNPSSEIRCSRWQDTSAMTFSNLENALVRPPHLFDTIRNLRIYTGTFRVNNNNFIEGWIGHSVTNNRLGISTEFTRNYGITTPIINSYNFANGDVYQINTRSNTSLIAFENAPLFGITRAQFQPGGTYSVTQRTLLCEQNYNSTDELPSLDPDEPISRSYSHRLSHITSYLHRVFTIDGNNIYSGNLPTYVWTHRDVDLTNTITADRITHLPLIKSNVQRSGLPVKGPGFTGGDVLRSSSSDADVSIIGVSAGAPLTQQYRIRVRYASNVDVTIRFVRHNTHSLLGIGTLSRTMNSGEESRYESYRTVDVITNFRLNSSSEQIRIVTEGLRANGQLYLDSLEFIPINPTREAEEDLEAAKKAVASLFTRTRDGLQANVTDYQVDRAANLVLCLSDEQYAHDKKMLLEAVRAAKRLSRERNLLQDPDFNEINSTEDSGWKTSNGIIISEGGPFFKGRALQLASARENYPTYIYQKVDSSMLKPYTRYKLDGFVQSSQDLEIELIHHHKVHLVKNVPDNLVLDTYPDGSCNGINRCEEQQMVNSQLETEHHPMDCCEASQTHEFSSYIHTGDLNASVDQGIWVVLKIRTTDGSATLGNLELVEVGPLSGESLEREQRDNAKWNAELGRKRAEADRVYQGAKQAINHLFVDYQDQQLNPEVGLAEISEARNLIESISDVYCDAVLRIPGINYEMYTELSNRLQQAAYLYTSRNAVQNGDFNSGLDSWNATTDATVQQDGNMYFLVLSHWDAQVSQQFRVQPNCKYVLRVTAKKVGNGDGYVTIQDGAHHRETLTFNACDYDVNGTHVNDNSYITKELEFYPKTEHMWVEVSETEGTFYIDSIELIETQE

SEQ ID NO: 506 - protein, 1157 aa, Bacillus thuringiensis tolworthi
MNRNNQNEYEIIDAPHCGCPSDDDVRYPLASDPNAALQNMNYKDYLQMTDEDYTDSYINPSLSISGRDAVQTALTVVGRILGALGVPFSGQIVSFYQFLLNTLWPVNDTAIWEAFMRQVEELVNQQITEFARNQALARLQGLGDSFNVYQRSLQNWLADRNDTRNLSVVRAQFIALDLDFVNAIPLFAVNGQQVPLLSVYAQAVNLHLLLLKDASLFGEGWGFTQGEISTYYDRQLELTAKYTNYCETWYNTGLDRLRGTNTESWLRYHQFRREMTLVVLDVVALFPYYDVRLYPTGSNPQLTREVYTDPIVFNPPANVGLCRRWGTNPYNTFSELENAFIRPPHLFDRLNSLTISSNRFPVSSNFMDYWSGHTLRRSYLNDSAVQEDSYGLITTTRATINPGVDGTNRIESTAVDFRSALIGIYGVNRASFVPGGLFNGTTSPANGGCRDLYDTNDELPPDESTGSSTHRLSHVTFFSFQTNQAGSIANAGSVPTYVWTRRDVDLNNTITPNRITQLPLVKASAPVSGTTVLKGPGFTGGGILRRTTNGTFGTLRVTVNSPLTQQYRLRVRFASTGNFSIRVLRGGVSIGDVRLGSTMNRGQELTYESFFTREFTTTGPFNPPFTFTQAQEILTVNAEGVSTGGEYYIDRIEIVPVNPAREAEEDLEAAKKAVASLFTRTRDGLQVNVTDYQVDQAANLVSCLSDEQYGHDKKMLLEAVRAAKRLSRERNLLQDPDFNTINSTEENGWKASNGVTISEGGPFFKGRALQLASARENYPTYIYQKVDASVLKPYTRYRLDGFVKSSQDLEIDLIHHHKVHLVKNVPDNLVSDTYSDGSCSGINRCDEQHQVDMQLDAEHHPMDCCEAAQTHEFSSYINTGDLNASVDQGIWVVLKVRTTDGYATLGNLELVEVGPLSGESLEREQRDNAKWNAELGRKRAEIDRVYLAAKQAINHLFVDYQDQQLNPEIGLAEINEASNLVESISGVYSDTLLQIPGINYEIYTELSDRLQQASYLYTSRNAVQNGDFNSGLDSWNTTMDASVQQDGNMHFLVLSHWDAQVSQQLRVNPNCKYVLRVTARKVGGGDGYVTIRDGAHHQETLTFNACDYDVNGTYVNDNSYITEEVVFYPETKHMWVEVSESEGSFYIDSIEFIETQE

SEQ ID NO: 507 - protein, 1156 aa, Bacillus thuringiensis
MNRNNQNEYEIIDAPHCGCPSDDDVRYPLASDPNAALQNMNYKDYLQMTDEDYTDSYINPSLSISGRDAVQTALTVVGRILGALGVPFSGQIVSFYQFLLNTLWPVNDTAIWEAFMRQVEELVNQQITEFARNQALARLQGLGDSFNVYQRSLQNWLADRNDTRNLSVVRAQFIALDLDFVNAIPLFAVNGQQVPLLSVYAQAVNLHLLLLKDASLFGEGWGFTQGEISTYYDRQLELTAKYTNYCETWYNTGLDRLRGTNTESWLRYHQFRREMTLVVLDVVALFPYYDVRLYPTGSNPQLTREVYTDPIVFNPPANVGLCRRWGTNPYNTFSELENAFIRPPHLFDRLNSLTISSNRFPVSSNFMDYWSGHTLRRSYLNDSAVQEDSYGLITTTRATINPGVDGTNRIESTAVDFRSALIGIYGVNRASFVPGGLFNGTTSPANGGCRDLYDTNDELPPDESTGSSTHRLSHVTFFSFQTNQAGSIANAGSVPTYVWTRRDVDLNNTITPNRITQLPLVKASAPVSGTTVLKGPGFTGGGILRRTTNGTFGTLRVTVNSPLTQRYRVRVRFASSGNFSIRILRGNTSIAYQRFGSTMNRGQELTYESFVTSEFTTNQSDLPFTFTQAQENLTILAEGVSTGSEYFIDRIEIIPVNPAREAEEDLEAAKKAVANLFTRTRDGLQVNVTDYQVDQAANLVSCLSDEQYGHDKKMLLEAVRAAKRLSRERNLLQDPDFNTINSTEENGWKASNGVTISEGGPFFKGRALQLASARENYPTYIYQKVDASVLKPYTRYRLDGFVKSSQDLEIDLIHHHKVHLVKNVPDNLVSDTYSDGSCSGINRCDEQHQVDMQLDAEHHPMDCCEAAQTHEFSSYINTGDLNASVDQGIWVVLKVRTTDGYATLGNLELVEVGPLSGESLEREQRDNAKWNAELGRKRAEIDRVYLAAKQAINHLFVDYQDQQLNPEIGLAEINEASNLVESISGVYSDTLLQIPGINYEIYTELSDRLQQASYLYTSRNAVQNGDFNSGLDSWNTTMDASVQQDGNMHFLVLSHWDAQVSQQLRVNPNCKYVLRVTARKVGGGDGYVTIRDGAHHQETLTFNACDYDVNGTYVNDNSYITEEVVFYPETKHMWVEVSESEGSFYIDSIEFIETQE

SEQ ID NO: 508 - protein, 1169 aa, Bacillus thuringiensis japonensis N141
MNRNNQNEYEVIDAPHCGCPADDVVKYPLTDDPNAGLQNMNYKEYLQTYGGDYTDPLINPNLSVSGKDVIQVGINIVGRLLSFFGFPFSSQWVTVYTYLLNSLWPDDENSVWDAFMERVEELIDQKISEAVKGRALDDLTGLQYNYNLYVEALDEWLNRPNGARASLVSQRFNILDSLFTQFMPSFGSGPGSQNYATILLPVYAQAANLHLLLLKDADIYGARWGLNQTQIDQFHSRQQSLTQTYTNHCVTAYNDGLAELRGTTAESWFKYNQYRREMTLTAMDLVALFPYYNLRQYPDGTNPQLTREVYTDPIAFDPLEQPTTQLCRSWYINPAFRNHLNFSVLENSLIRPPHLFERLSNLQILVNYQTNGSAWRGSRVRYHYLHSSIIQEKSYGLLSDPVGANINVQNNDIYQIISQVSNFASPVGSSYSVWDTNFYLSSGQVSGISGYTQQGIPAVCLQQRNSTDELPSLNPEGDIIRNYSHRLSHITQYRFQATQSGSPSTVSANLPTCVWTHRDVDLDNTITANQITQLPLVKAYELSSGATVVKGPGFTGGDVIRRTNTGGFGAIRVSVTGPLTQRYRIRFRYASTIDFDFFVTRGGTTINNFRFTRTMNRGQESRYESYRTVEFTTPFNFTQSQDIIRTSIQGLSGNGEVYLDRIEIIPVNPAREAEEDLEAAKKAARQNLFTRTRDGLQVNVTDYQVDQAANLVSCLSDEQYGHDKKMLLEAVRAAKRLSRERNLLQDPDFNTINSTEENGWKASNGVTISEGGPFFKGRALQLASARENYPTYIYQKVDASVLKPYTRYRLDGFVKSSQDLEIDLIHYHKVHLVKNVPDNLVSDTYSDGSCSGMNRCEEQQMVNAQLETEHHHPMDCCEAAQTHEFSSYINTGDLNASVDQGIWVVLKVRTTDGYATLGNLELVEVGPLSGESLEREQRDNAKWNAELGRKRAEIDRVYLAAKQAINHLFVDYQDQQLNPEIGLAEINEASNLVESISGVYSDTLLQIPGINYEIYTELSDRLQQASYLYTSRNAVQNGDFNSGLDSWNTTTDASVQQDGNMHFLVLSHWDAQVSQQLRVNPNCKYVLRVTARKVGGGDGYVTIRDGAHHQETLTFNACDYDVNGTYVNDNSYITEEVVFYPETKHMWVEVSESEGSFYIDSIEFIETQE

SEQ ID NO: 509 - protein, 645 aa, Bacillus thuringiensis japonensis
HCGCPADDVVKYPLTDDPNAGLQNMNYKEYLQTYGGDYTDPLINPNLSVSGKDVIQVGINIVGRLLSFFGFPFSSQWVTVYTYLLNSLWPDDENSVWDAFMERVEELIDQKISEAVKGRALDDLTGLQYNYNLYVEALDEWLNRPNGARASLVSQRFNILDSLFTQFMPSFGSGPGSQNYATILLPVYAQAANLHLLLLKDADIYGARWGLNQTQIDQFHSRQQSLTQTYTNHCVTAYNDGLAELRGTTAESWFKYNQYRREMTLTAMDLVALFPYYNLRQYPDGTNPQLTREVYTDPIAFDPLEQPTTQLCRSWYINPAFRNHLNFSVLENSLIRPPHLFERLSNLQILVNYQTNGSAWRGSRVRYHYLHSSIIQEKSYGLLSDPVGANINVQNNDIYQIISQVSNFASPVGSSYSVWDTNFYLSSGQVSGISGYTQQGIPAVCLQQRNSTDELPSLNPEGDIIRNYSHRLSHITQYRFQATQSGSPSTVSANLPTCVWTHRDVDLDNTITANQITQLPLVKAYELSSGATVVKGPGFTGGDVIRRTNTGGFGAIRVSVTGPLTQRYRIRFRYASTIDFDFFVTRGGTTINNFRFTRTMNRGQESRYESYRTVEFTTPFNFTQSQDIIRTSIQGLSGNGEVYLD

SEQ ID NO: 510 - protein, 1169 aa, Bacillus thuringiensis kurstaki DP1019
MNRNHQNEYEIIDAPHCGCPSDDVVKYPLTDDPNAGLQNMNYKEYLQMYGGDYTDPLINPNLSVSGKDVIQVGINIVGRLLSFFGFPFSSQWVTVYTYLLNSLWPDDENSVWDAFMKRIEELIDQKISEAVKGRALDELTGLQDNYNLYVEALDEWLNRPNGARASLVSQRFNILDSLFTQFMPSFGSGPGSQNYSTILLPVYAQAANLHLLLLKDADIYGARWGLNQTQIDQFHSRQQSLTRTYTNHCVTTYNDGLAELRGTSVESWLKYHQYRREMTVTAMDLVALFPYYNVRQYPNGANPQLTREVYTDPIVFNPPEPPSGAFCESFYNIRAARERLTFSQLENAIIRPPRLFERFQALGIYTGEARLNQNSAPTNYWIGHFIRNTRLGDSTTITTNYGTTNNRLTNFIPPTTSDVYQINSISSNLASALSTLFGVTRAQFHYGSGIIWSYVGQNNVLPQCHQNYNSIEELPNQSDEPTVRSYSHRLSHITSFNFSVQLNNPVISLGNMPVYVWTHRSVDLNNTITSDRITQLPAVKASTLGAGAIVVKGPGFTGGDVIRRTSVGDFGTIRVSVTGSLTQQYRIRFRYASTIDFDFFVIRGGTTINNFRFTHTMSSGEESRYESYRTVEFSTPFNFTQSQDIIRTSIQGLSGNGEVYLDRIEIIPVNPTREAEEDLEDAKKAVAGLFTRTRDGLQVNVTDYQVDRAANLVSCLSDEQYSHDKKMLMEAVRAAKRLSRERNLLQDPDFNEINSTEENGWKASNGIIISEGGPFFKGRVLQLASARENYPTYIYQKVDASVLKPYTRYRLDGFVKSSEDLEIDLVHQHKVHLVKNVPDNLVSDTYPDGSCRGVNRCDEQHQVDVQIDTEHHPMDCCEAAQTHEFSSYINTGDLNSSVDQGIWVVLKVRTADGYATLGNLELVEVGPLSGESLEREQRDNAKWNAELGRERAETDRVYLAAKQAINHLFVDYQDQQLNPEIGLAEINEASNLVESITGVYSDTVLQIPGISYEIYTELSDRLQQASYLYTSRNAVQNGDFDSGLDSWNATTDASVQQDGNMHFLVLSHWDAQVTQQLRVNPNCKYVLRVTARKVGGGDGYVTIRDGAHHRETLTFNACDYDVNGTYVNDNTYITKEVVFYPHTEHTWVEVSESEGAFYIDSIELIETQE

SEQ ID NO: 511 - protein, 1150 aa, Bacillus thuringiensis aizawai SSK-10
MNRNNPNEYEIIDAPYCGCPSDDDVRYPLASDPNAAFQNMNYKEYLQTYDGDYTGSLINPNLSINPRDVLQTGINIVGRILGFLGVPFAGQLVTFYTFLLNQLWPTNDNAVWEAFMAQIEELIDQKISAQVVRNALDDLTGLHDYYEEYLAALEEWLERPNGARANLVTQRFENLHTAFVTRMPSFGTGPGSQRDAVALLTVYAQAANLHLLLLKDAEIYGARWGLQQGQINLYFNAQQERTRIYTNHCVETYNRGLEDVRGTNTESWLNYHRFRREMTLMAMDLVALFPFYNVRQYPNGANPQLTREIYTDPIVYNPPANQGICRRWGNNPYNTFSELENAFIRPPHLFERLNRLTISRNRYTAPTTNSFLDYWSGHTLQSQHANNPTTYETSYGQITSNTRLFNTTNGARAIDSRARNFGNLYANLYGVSSLNIFPTGVMSEITNAANTCRQDLTTTEELPLENNNFNLLSHVTFLRFNTTQGGPLATLGFVPTYVWTREDVDFTNTITADRITQLPWVKASEIGGGTTVVKGPGFTGGDILRRTDGGAVGTIRANVNAPLTQQYRIRLRYASTTSFVVNLFVNNSAAGFTLPSTMAQNGSLTYESFNTLEVTHTIRFSQSDTTLRLNIFPSISGQEVYVDKLEIVPINPTREAEEDLEDAKKAVASLFTRTRDGLQVNVTDYQVDQAANLVSCLSDEQYGHDKKMLLEAVRAAKRLSRERNLLQDPDFNEINSTEENGWKASNGVTISEGGPFFKGRALQLASARENYPTYIYQKVDASTLKPYTRYKLDGFVQSSQDLEIDLIHHHKVHLVKNVPDNLVSDTYSDGSCSGINRCEEQHQVDVQLDAEDHPKDCCEAAQTHEFSSYIHTGDLNASVDQGIWVVLQVRTTDGYATLGNLELVEVGPLSGESLEREQRDNAKWNEEVGRKRAETDRIYQDAKQAINHLFVDYQDQQLSPEVGMADIIDAQNLIASISDVYSDAVLQIPGINYEMYTELSNRLQQASYLYTSRNVVQNGDFNSGLDSWNATTDTAVQQDGNMHFLVLSHWDAQVSQQFRVQPNCKYVLRVTAKKVGNGDGYVTIQDGAHHRETLTFNACDYDVNGTHVNDNSYITKELVFYPKTEHMWVEVSETEGTFYIDSIEFIETQE

SEQ ID NO: 512 - protein, 1150 aa, Bacillus thuringiensis B-Hm-16; identical to SEQ ID NO: 511

SEQ ID NO: 513 - protein, 1150 aa, Bacillus thuringiensis lyA
MNRNNPNEYEIIDAPYCGCPSDDDVRYPLASDPNAAFQNMNYKEYLQTYDGDYTGSLINPNLSINPRDVLQTGINIVGRILGFLGVPFAGQLVTFYTFLLNQLWPTNDNAVWEAFMAQIEELIDQKISAQVVRNALDDLTGLHDYYEEYLAALEEWLERPNGARANLVTQRFENLHTAFVTRMPSFGTGPGSQRDAVALLTVYAQAANLHLLLLKDAEIYGARWGLQQGQINLYFNAQQERTRIYTNHCVETYNRGLEDVRGTNTESWLNYHRFRREMTLMAMDLVALFPFYNVRQYPNGANPQLTREIYTDPIVYNPPANQGICRRWGNNPYNTFSELENAFIRPPHLFERLNRLTISRNRYTAPTTDSFLDYWSGHTLQSQHANNPTTYETSYGQITSNTRLFNTTNGARAIDSRARNFGNLYANLYGVSSLNIFPTGVMSEITNAANTCRQDLTTTEELPLENNNFNLLSHVTFLRFNTTQGGPLATLGFVPTYVWTREDVDFTNTITADRITQLPWVKASEIGGGTTVVKGPGFTGGDILRRTDGGAVGTIRANVNAPLTQQYRIRLRYASTTSFVVNLFVNNSAAGFTLPSTMAQNGSLTYESFNTLEVTHTIRFSQSDTTLRLNIFPSISGQEVYVDKLEIVPINPTREAEEDLEDAKKAVASLFTRTRDGLQVNVTDYQVDQAANLVSCLSDEQYGHDKKMLLEAVRAAKRLSRERNLLQDPDFNEINSTEENGWKASNGVTISEGGPFFKGRALQLASARENYPTYIYQKVDASTLKPYTRYKLDGFVQSSQDLEIDLIHHHKVHLVKNVPDNLVSDTYSDGSCSGINRCEEQHQVDVQLDAEDHPKDCCEAAQTHEFSSYIHTGDLNASVDQGIWVVLQVRTTDGYATLGNLELVEVGPLSGESLEREQRDNAKWNEEVGRKRAETDRIYQDAKQAINHLFVDYQDQQLSPEVGMADIIDAQNLIASISDVYSDAVLQIPGINYEMYTELSNRLQQASYLYTSRNVVQNGDFNSGLDSWNATTDTAVQQDGNMHFLVLSHWDAQVSQQFRVQPNCKYVLRVTAKKVGNGDGYVTIQDGAHHRETLTFNACDYDVNGTHVNDNSYITKELVFYPKTEHMWVEVSETEGTFYIDSIEFIETQE

SEQ ID NO: 514 - protein, 1150 aa, Bacillus thuringiensis ywc5-4
MNRNNPNEYEIIDAPYCGCPSDDDVRYPLASDPNAAFQNMNYKEYLQTYDGDYTGSLINPNLSINPRDVLQTGINIVGRILGFLGVPFAGQLVTFYTFLLNQLWPTNDNAVWEAFMAQIEELIDQKISAQVVRNALDDLTGLHDYYEEYLAALEEWLERPNGARANLVTQRFENLHTAFVTRMPSFGTGPGSQRDAVALLTVYAQAANLHLLLLKDAEIYGARWGLQQGQINLYFNAQQERTRIYTNHCVETYNRGLEDVRGTNTESWLNYHRFRREMTLMAMDLVALFPFYNVRQYPNGANPQLTREIYTDPIVYNPPANQGICRRWGNNPYNTFSELENAFIRPPHLFERLNRLTISRNRYTAPTTNSFLDYWSGHTLQSQHANNPTTYETSYGQITSNTRLFNTTNGARAIDSRARNFGNLYANLYGVSSLNIFPTGVMSEITNAANTCRQDLTTTEELPLENNNFNLLSHVTFLRFNTTQGGPLATLGFVPTYVWTREDVDFTNTITADRITQLPWVKASEIGGGTTVVKGPGFTGGDILRRTDGGAVGTIRANVNAPLTQQYRIRLRYASTTSFVVNLFVNNSAAGFTLPSTMAQNGSLTYESFNTLEVTHTIRFSQSDTTLRLNIFPSISGQEVYVDKLEIVPINPTREAEEDLEDAKKAVASLFTRTRDGLQVNVTDYQVDQAANLVSCLSDEQYGHDKKMLLEAVRAAKRLSRERNLLQDPDFNEINSTEENGWKASNGVTISEGGPFFKGRALQLASARENYPTYIYQKVDASTLKPYTRYKLGGFVQSSQDLEIDLIHHHKVHLVKNVPDNLVSGTYSDGSCSGINRCEEQHQVDVQLDAEDHPKDCCEAAQTHEFSSYIHTGDLNASVDQGIWVVLQVRTTDGYATLGNLELVEVGPLSGESLEREQRDNAKWNEEVGRKRAETDRIYQDAKQAINHLFVDYQDQQLSPEVGMADIIDAQNLIASISDVYSDAVLQIPGINYEMYTELSNRLQQASYLYTSRNVVQNGDFNSGLDSWNATTDTAVQQDGNMHFLVLSHWDAQVSQQFRVQPNCKYVLRVTAKKVGNGDGYVTIQDGAHHRETLTFNACDYDVNGTHVNDNSYITKELVFYPKTEHMWVEVSETEGTFYIDSIEFIETQE

SEQ ID NO: 515 - protein, 1150 aa, Bacillus thuringiensis
MNRNNPNEYDIIDAPYCGCPSDDDVRYPLASDPDAAFQNMNYKEYLQTYDGDYTGSLINPNLSINPRDVLQTGINIVGRILGFLGVPFAGQLVTFYTFLLNQLWPTNDNAVWEAFMAQIEELIDQKISAQVVRNALDDLTGLHDYYEEYLAALEEWLERPNGARANLVTQRFENLHTAFVTRMPSFGTGPGSQRDAVALLTVYAQAANLHLLLLKDAEIYGARWGLQQGQINLYFNAQQERTRIYTNHCVETYNRGLEDVRGTNTESWLNYHRFRREMTLMAMDLVALFPFYNVRQYPNGANPQLTREIYTDPIVYNPPANQGICRRWGNNPYNTFSELENAFIRPPHLFERLNRLTISRNRYTAPTTNSFLDYWSGHTLQSQHANNPTTYETSYGQITSNTRLFNTTNGARAIDSRARNFGNLYANLYGVSSLNIFPTGVMSEITNAANTCRQDLTTTEELPLENNNFNLLSHVTFLRFNTTQGGPLATLGFVPTYVWTREDVDFTNTITADRITQLPWVKASEIGGGTTVVKGPGFTGGDILRRTDGGAVGTIRANVNAPLTQQYRIRLRYASTTSFVVNLFVNNSAAGFTLPSTMAQNGSLTYESFNTLEVTHTIRFSQSDTTLRLNTSPSISGQEVYVDKLEIVPINPTREAEEDLEDAKKAVASLFTRTRDGLQVNVTDYQVDQAANLVSCLSDEQSGHDKKMLLEAVRAAKRLSRERNLLQDPDFNEINSTEENGWKASNGVTISEGGPFFKGRALQLASARENYPTYIYQKVDASTLKPYTRYKLDGFVQSSQDLEIDLIHHHKVHLVKNVPDNLVSDTHSDGSCSGINRCEEQHQVDVQLDAEDHPKDCCEAAQTHEFSSYIHTGDLNASVDQGIWVVLQVRTTDGYATLGNLELVEVGPLSGESLEREQRDNAKWNEEVGRKRAETDRIYQDAKQAINHLFVDYQDQQLSPEVGMADIIDAQNLIASISDVYSDAVLQIPGINYEMYTELSNRLQQASYLYTSRNVVQNGDFNSGLDSWNATTDTAVQQDGNMHFLVLSHWDAQVSQQFRVQPNCKYVLRVTAKKVGNGDGYVTIQDGAHHRETLTFNACDYDVNGTHVNDNSYITKELVFYPKTEHMWVEVSETEGTFYIDSIEFIETQE

SEQ ID NO: 516 - protein, 1150 aa, Bacillus thuringiensis 11
MNRNNPNEYEIIDAPYCGCPSDDDVRYPLASDPNAAFQNMNYKEYLQTYDGDYTGSLINPNLSINPRDVLQTGINIVGRILGFLGVPFAGQLVTFYTFLLNQLWPTNDNAVWEAFMAQIEELIDQKISAQVVRNALDDLTGLHDYYEEYLAALEEWLERPNGARANLVTQRFENLHTAFVTRMPSFGTGPGSQRDAVALLTVYAQAANLHLLLLKDAEIYGARWGLQQGQINLYFNAQQERTRIYTNHCVETYNRGLEDIRGTNTESWLNYHRFRREMTLMAMDLVALFPFYNVRQYPNGANPQLTREIYTDPIVYNPPANQGICRRWGNNPYNTFSELENAFIRPPHLFERLNRLTISRNRYTAPTTNSFLDYWPGHTLQSQHANNPTTYETSYGQITSNTRLFNTTNGARAIDSRARNFGNLYANLYGVSSLNIFPTGVMSEITNAANTCRQDLTTTEELPLENNNFNLLSHVTFLRFNTTQGGPLATLGFVPTYVWTREDVDFTNTITADRITQLPWVKASEIGGGTTVVKGPGFTGGDILRRTDGGAVGTIRANVNAPLTQQYRIRLRYASTTSFVVNLFVNNSAAGFTLPSTMAQNGSLTYESFNTLEVTHTIRFSQSDTTLRLNIFPSISGQEVYVDKLEIVPINPTREAEEDLEDAKKAVASLFTRTRDGLQVNVTDYQVDQAANLVSCLSDEQYGHDKKMLLEAVRAAKRLSRERNLLQDPDFNEINSTEENGWKASNGVTISEGGPFFKGRALQLASARENYPTYIYQKVDASTLKPYTRYKLDGFVQSSQDLEIDLIHHHKVHLVKNVPDNLVSDTYSDGSCSGINRCEEQHQVDVQLDAEDHPKDCCEAAQTHEFSSYIHTGDLNASVDQGIWVVLQVRTTDGYATLGNLELVEVGPLSGESLEREQRDNAKWNEEVGRKRAETDRIYQDAKRAINHLFVDYQDQQLSPEVGMADIIDAQNLIASISDVYSDAVLQIPGINYEMYTELSNRLQQASYLYTSRNVVQNGDFNSGLDSWNATTDTAVQQDGNMHFLVLSHWDAQVSQQFRVQPNCKYVLRVTAKKVGNGDGYVTIQDGAHHRETLTFNACDYDVNGTHVNDNSYITKELVFYPKTEHMWVEVSETEGTFYIDSIEFIETQE

SEQ ID NO: 517 - protein, 1150 aa, Bacillus thuringiensis 4
MNRNNPNEYEIIDASYCGCPSDDDVRYPLASDPNAAFQNMNYKEYLQTYDGDYTGSLINPNLSINPRDVLQTGINIVGRILGFLGVPFAGQLVTFYTFLLNQLWPTNDNAVWEAFMAQIEELIDQKISAQVVRNALDDLTGLHDYYEEYLAALEEWLERPNGARANLVTQRFENLHTAFVTRMPSFGTGPGSQRDAVALLTVYAQAANLHLLLLKDAEIYGARWGLQQGQINLYFNAQQERTRIYTNHCVETYNRGLEDVRGTNTESWLNYHRFRREMTLMAMDLVALFPFYNVRQYPNGANPQLTREIYTDPIVYNPPANQGICRRWGNNPYNTFSELENAFIRPPHLFERLNRLTISRNRYTAPTTNSFLDYWSGHTLQSQHANNPTTYETSYGQITSNTRLFNTTNGARAIDSRARNFGNLYANLYGVSSLNIFPTGVMSEITNAANTCRQDLTTTEELPLENNNFNLLSHVTFLRFNTTQGGPLATLGFVPTYVWTREDVDFTNTITADRITQLPWVKASEIGGGTTVVKGPGFTGGDILRRTDGGAVGTIRANVNAPLTQQYRIRLRYASTTSFVVNLFVNNSAAGFTLPSTMAQNGSLTYESFNTLEVTHTIRFSQSDTTLRLNIFPSISGQEVYVDKLEIVPINPTREAEEDLEDAKKAVASLFTRTRDGLQVNVTDYQVDQAANLVSWLSDEQYGHDKKMLLETVRAAKHLSRERNILLDPDFIEINSTEENGWKASNGVTIREGGPLFKGGALQLASARENYPTYIFQKVDASTLKPYTRYKLDGFVQSSQDLEIDLIHHHKVPLVKKVPDNLVFDTYFDGSCSGNNRCEGQHQVDVQLDAGGHPKGCCEAGQTHEFSSYIHTGDLNASVDQGIWVVLQVRTTDGYATLGNLELVEVGPLSGESLEREQRDNAKWNEEVGRKRAETDRIYQDAKQAINHLFVDYQDQQLSPEVGMADIIDAQNLIASISDVYSDAVLQIPGINYEMYTELSNRLQQASYLYTSRNVVQNGDFNSGLDSWNATTDTAVQQDGNMHFLVLSHWDAQVSQQFRVQPNCKYVLRVTAKKVGNGDGYVTIQDGAHHRETLTFNACDYDVNGTHVNDNSYITKELVFYPKTEHMWVEVSETEGTFYIDSIEFIETQE

SEQ ID NO: 518 - protein, 1152 aa, Bacillus thuringiensis
MNRNNQNDYEVIDASNCGCASDDVVQYPLARDPNAVFQNMHYKDYLQTYDGDYTGSFINPNLSINPRDVLQTGINIVGRLLGFLGVPFAGQLVTFYTFLLNQLWPTNDNAVWEAFMAQIEELINQRISEAVVGTAADHLTGLHDNYELYVEALEEWLERPNAARTNLLFNRFTTLDSLFTQFMPSFGTGPGSQNYAVPLLTVYAQAANLHLLLLKDAEIYGARWGLNQNQINSFHTRQQERTQYYTNHCVTTYNTGLDRLRGTNTESWLNYHRFRREMTLMAMDLVALFPYYNVRQYPNGANPQLTREIYTDPIVYNPPANQGICRRWGNNPYNTFSELENAFIRPPHLFDRLNRLTISRNRYTAPTTNSYLDYWSGHTLQSQYANNPTTYETSYGQITSNTRLFNTTNGANAIDSRARNFGNLYANLYGVSYLNIFPTGVMSEITSAPNTCWQDLTTTEELPLVNNNFNLLSHVTFLRFNTTQGGPLATVGFVPTYVWTRQDVDFNNIITPNRITQIPVVKAYELSSGATVVKGPGFTGGDVIRRTNTGGFGAIRVSVTGPLTQRYRIRFRYASTIDFDFFVTRGGTTINNFRFTRTMNRGQESRYESYRTVEFTTPFNFTQSQDIIRTSIQGLSGNGEVYLDRIEIIPVNPTREAEEDLEAAKKAVASLFTRTRDGLQVNVTDYQVDQAANLVSCLSDEQYAHDKKMLLEAVRAAKRLSRERNLLQDPDFNTINSTEENGWKASNGVTISEGGPFYKGRALQLASARENYPTYIYQKVDASELKPYTRYRLDGFVKSSQDLEIDLIHHHKVHLVKNVLDNLVSDTYPDDSCSGINRCEEQQMVNAQLETEHHHPMDCCEAAQTHEFSSYIDTGDLNSTVDQGIWVIFKVRTTDGYATLGNLELVEVGPLLGEPLEREQRENAKWNAELGRKRAETDRVYQDAKQSINHLFVDYQDQQLNPQIGMADIMDAQNLVASISDVYSDAVLQIPGINYEIYTELSNRLQQASYLYTSRNAVQNGDFNNGLDSWNATAGASVQQDGNTHFLVLSHWDAQVSQQFRVQPNCKYVLRVTAEKVGGGDGYVTIRDGAHHTETLTFNACDYDINGTYVTDNTYLTKEVIFYSHTEHMWVEVNETEGAFHIDSIEFVETEK

SEQ ID NO: 519 - protein, 1154 aa, Bacillus thuringiensis kurstaki DP1019
MNRNNQNEYEIIDGTNCDCSSDEVVKYPLASEQNGVLQNMNYKEYLQTYDGDYTGSLINPNLSINTRDVLQTGITIVGRVLGFLGVPFAGQLVTFYTFLLNQLWPTNNNAVWEAFMAQVEELIDQRISDQVVRNALDDLTGLHDYYNEYLAALEEWLDRPNGARANLAFQRFENLHTAFVTRMPSFGTGPGSQRDAVALLTVYAQAANLHLLLLKDAEIYGARWGLQQSQINLYFNAQQDRTRIYTNHCVATYNRGLEDLKGTNTESWYNYHQFRREMTLMAMDLVALFPYYNVRQYPNGANPQLTREIYTDPVVFNPPANQGLCRRWGNNPYMTFSGLENAFIRPPHLFDRLNSLTINSHRFPISSNFMDYWAGHTLRRSYMNNSAVQEDSYGAITPTRVTINPGVNGTNHIESTAVDFRSGLVGIYGVHRASFVPGGLFNGTISPANAGCRNLHDTRDVLPLEENNGSPSHRLSHVTFLSFQTNQAGSLANGGSVPLYVWARQDIDFNNTITANRITQLPLVKAFEIAAGTTIVKGPGFTGGDILRRTSTGTLGTIRVNVNSPLTQRYRVRFRYASTVDFDFFVSRGGTTVNNFRFPRTMSRGQESRYESYVTSEFTTPFTFTQSQDFIRTSIQGLSGNGEVYLDRIEIIPVNPAREAEEDLEAAKKAVASLFTRTRDGLQVNVTDYQVDQAANLVSCLSDEQYGHDKKMLLEAVRAAKRLSRERNLLQDPDFNEINSIEENGWKASNGVTISEGGPFFKGRALQLASARENYPTYIYQKVDASVLKPYTRYRLDGFVKSSQDLEIDLIHHHKVHLVKNVPDNLVSDTYSDGSCSGINRCDEQHQVDMQLDAEHHPMDCCEAAETHEFSSYIDTGDLNPSVDQGIWVVLKVRTTDGYATLGNLELVEVGSLSGESLEREKRENAEWNAELGRKRAETERVYQAAKRAINHLFVDYQDQQLNLEVGLAEINEVSNLVESIPSVYSDTVLQIPGVNYEIYTELSNRLQQASYLYMSRNAVQNGDFNNGLDSWNATTDATVQQDGTMHFLVLSHWDAQVSQPLRVQPNCKYVLRVTARKVGSGDGYVTIRNGAHHHETLIFNACDYDINGTYVNENTYITKEVVFYPHTEHTWVEVSESEGAFYIDSIELIETQE

SEQ ID NO: 520 - protein, 249 aa, Bacillus thuringiensis israelensis
MENLNHCPLEDIKVNPWKTPQSTARVITLRVEDPNEINNLLSINEIDNPNYILQAIMLANAFQNALVPTSTDFGDALRFSMPKGLEIANTITPMGAVVSYVDQNVTQTNNQVSVMINKVLEVLKTVLGVALSGSVIDQLTAAVTNTFTNLNTQKNEAWIFWGKETANQTNYTYNVLFAIQNAQTGGVMYCVPVGFEIKVSAVKEQVLFFTIQDSASYNVNIQSLKFAQPLVSSSQYPIADLTSAINGTL

SEQ ID NO: 521 - protein, 249 aa, Bacillus thuringiensis israelensis; identical to SEQ ID NO: 520

SEQ ID NO: 522 - protein, 249 aa, Bacillus thuringiensis LLP29
MENLNHCPLEDIKVNPWKTPQSKARVITLRVEDPNEINNLLSINEIDNPNYILQAIMLANAFQNALVPTSTDFGDALRFSMPKGLEIANTITPMGAVVSYVDQNVTQTNNQVSVMINKVLEVLKTVLGVALSGSVIDQLTAAVTNTFTNLNTQKNEAWIFWGKETANQTNYTYNVLFAIQNAQTGGVMYCVPVGFEIKVSAVKEQVLFFTIQDSASYNVNIQSLKFAQPLVSSSQYPIADLTSAINGTL

SEQ ID NO: 523 - protein, 131 aa, Bacillus thuringiensis LDC-9
MFFLLTKLIISNYILQAIMLANAFQNALVPTSTDFGDALRFSMPKGLEIANTITPMGAVVSYVDQNVTQTNNQVSVMINKVLEVLKTVLGVALSGSVIDQLTAAVTNTFTNLNTQKNEAWICWGKETANQT

SEQ ID NO: 524 - protein, 252 aa, Bacillus thuringiensis s. israelensis IPS82
MHLNNLNNFNNLENNGEYHCSGPIIKKPFRHIALTVPSSDITNFNEIFYVEPQYIAQAIRLTNTFQGAIDPLTLNFNFEKALQIANGLPNAGVTGTINQSVIHQTIEVSVMISQIKEIIRSVLGLVINSANFWNSVVSAITNTFTNLEPQVDENWIVWRNLSATQTSYFYKILFSIQNEDTGRFMAILPIAFEITVDVQKQQLLFITIKDSARYEVKMKALTVVQALDSYNAPIIDVFNVRNYSLHRPNHNI

SEQ ID NO: 525 - protein, 262 aa, Bacillus thuringiensis LLP29
MHLNNLNNFNNLENNGEYHCSAPIIKKPFRHIALTVPSSDITNFNEIFYVEPQYIAQAIRLTNTFQGAIDPLTLNFNFEKALQIANGLPNAGVTGTINQSVIHQTIEVSVMISQIKEIIRSVLGLVINSANFWNSVVSAITNTFTNLEPQVDENWIVWRNLSATQTSYFYKILFSIQNEDTGRFMAILPIAFEITVDVQKQQLLFITIKDSARYEVKMKALTVVQALDSYNAPIIDVFNVRNYSLHRPNHNILQNLNVNPIK

SEQ ID NO: 526 - protein, 156 aa, Bacillus thuringiensis israelensis PG14
NTFQGAIDPLTLNFNFEKALQIANGLPNAGVTGTINQSVIHQTIEVSVMISQIKEIIRSVLGLVINSANFWNRVVSAITNTFTNLEPQVDENWIVWRNLSATQTSYFYKILFSIQNEDTGRFMAILPIAFEITVDVQKQQLLFITIKDSARYEVKM

SEQ ID NO: 527 - protein, 156 aa, Bacillus thuringiensis morrisoni HD12
NTFQGAIDPLTLNFNFEKALQIANGLPNAGVTGTINQSVIHQTIEVSVMISQIKEIIRSVLGLVINSANFWNSVVSAITNTFTNLEPQVDENWIVWRNLSATQTSYFYKILFSIQNEDTGRFMAILPIAFEITVDVQKQQLLFITIKDSARYEVKM

SEQ ID NO: 528 - protein, 157 aa, Bacillus thuringiensis tenebrionis
NTFQGAIDPLTLNFNFEKALQIANGLPNAGVTGTINQSVIHQTIEVSVMISQIKEIIRSVLGLVINSANFWNSVVSAITNTFTNLEPQVDENWIVWRNLSATQTSYFYKILFSIQNEDTGRFMAILPIAFEITVDVQKQQLLFITIKDSARYEVKMK

SEQ ID NO: 529 - protein, 263 aa, Bacillus thuringiensis T36
MHLNNLNNFNNLENNGEYHRSGPIIKKPFRHIALTVPSSDITNFNEIFYVEPQYIAQAIRLTNTFQGAIDPLTLNFNFEKALQIANGLPNAGVTGTIIQSVIHQTIEVSVMISQIKEIIRSVLGLVINSANFWNSVVSAITNTFTNLEPQVDENWIVWRNLSATQTSYFYKILFSIQNEDTGRFMAILPIAFEITVDVQKQQLLFITIKDSARYEVKMKALTVVQALDSYNAPIIDVFNVRNYSLHRPNHNILQNLNVNPIKS

SEQ ID NO: 530 - protein, 119 aa, Bacillus thuringiensis LDC-9
LQIANGIPNAGVTGTINQSVIHQTIEVSVMISQIKEIIRSVLGLVINSANFWNSVVSAITNTFTNLEPQVDENWIVWRNLSATQTSYFYKILFSIQNEDTGRFMAILPIAFEITVDVGK

SEQ ID NO: 531 - protein, 260 aa, Bacillus thuringiensis medellin
MYINNFDFPEKNNDYQCSGPIIKKPFRHIALTVPSSDITNFNEIFYVEPQYIAQALRLTNTFQGAIDPLTLNFNFEKALQIANGLPNAGVTGTLNQSVIHQTIEISVMISQIKEIIRSVLGLVINSANFWNNVVSAITNTFTNLEPQVDENWIVWRNLSANQTSYYYKILFSIQNEDTGRFMAVLPIAFEINVDVHKQQLLFITIKDSARYEVKMKALTVVQALDSYNAPIIDVFNIHNYSLHRPNYHILQNLNVNPIKS

SEQ ID NO: 532 - protein, 138 aa, Bacillus thuringiensis serovar darmstadiensis
QIANGIPNAGVTGTINQSVIHQTIEVSVMISQIKEIIRSVLGLVINSANFWNSVVSAITNTFTNLEPQVDENWIVWRNLSATQTSYFYKILFSIQNEDTGRFMAILPIAFEITVDVQKQQLLFITIKDSARYAVTMKA

SEQ ID NO: 533 - protein, 231 aa, Bacillus thuringiensis
MFFNRVITLTVPSSDVVNYSEIYQVAPQYVNQALTLAKYFQGAIDGSTLRFDFEKALQIANDIPQAAVVNTLNQTVQQGTVQVSVMIDKIVDIMKNVLSIVIDNKKFWDQVTAAITNTFTNLNSQESERWIFYYKEDAHKTSYYYNILFAIQDEETGGVMATLPIAFDISVDIEKEKVLFVTIKDTENYAVTVKAINVVQALQSSRDSKVVDAFKSPRHLPRKRHKICSNS

SEQ ID NO: 534 - protein, 41 aa, Atrax robustus
GSQYCAPADQPCSLNTQPCCDDVTCTQERNENGHTAYYCRV

SEQ ID NO: 535 - protein, 98 aa, Hadronyche versuta
MKFSKLSLTLALILTQALFVLCGKINEDFMKNGLESQTLHDEIRKPIDSENPDTERLLDCLLDNRVCSSDRDCCGMTPSCTMGLCVPNVGGLVGGILG

SEQ ID NO: 536 - protein, 98 aa, Atrax robustus; identical to SEQ ID NO: 535

SEQ ID NO: 537 - protein, 98 aa, Hadronyche versuta
MKFSKLSLTLALILTQAIFVLCGKINEDFMKNDLESQALRDEIRKPIDSENPDTERLLDCLLDNRVCSSDKDCCGMTPSCTMGLCVPSVGGLVGGILG

SEQ ID NO: 538 - protein, 98 aa, Hadronyche versuta
MKFSKLSLTLALILTQAIFVLCGKINEDFMKNDLESHALHDEIRKPINSENPDTERLLDCLLDNRVCSSDKDCCGMTPSCTMGLCVPSVGGLVGGILG

SEQ ID NO: 539 - protein, 98 aa, Hadronyche versuta
MKFSKLSLTLALILTQALFVLCGKINEDFMKNGLESQALHDEIRKPIDSENPDTERLLDCLLDNRVCSSDKDCCGMTPSCTMGLCVPSVGGLVGGILG

SEQ ID NO: 540 - protein, 98 aa, Hadronyche versuta
MKFSKLSLTLALILTQVIFVLCGKINEDFMKNGLESQALHDEIRKPIDSENPDTERLLDCLLDNRVCSSDKDCCGMTPSCTMGLCVPSVGGLVGGILG

SEQ ID NO: 541 - protein, 93 aa, Hadronyche versuta
MKFSKLSLTLALILTQALFVLCDFMKNGLESQALHDEIRKSIDSENPDTERLLDCLLDNRVCSSDKDCCGMTPSCTMGLCVPSVGGLVGGILG

SEQ ID NO: 542 - protein, 98 aa, Atrax robustus
MKFSKLSLTLALILTQVLFVLCGKINEDFMKHGLESQALHDEIRKPIDSENPDTERLLDCLLDNRVCSSDKDCCGMTPSCTMGLCVPSVGGLVGGILG

SEQ ID NO: 543 - protein, 98 aa, Hadronyche versuta
MKFSKLSLTLALILTQAIFVLCGKINEDFMKNDLESQALHDEIRKPINSENPDTERLLDCLLDNRVCSSDKDCCGMTPSCTMGLCVPSVGGLVGGILG

SEQ ID NO: 544 - protein, 98 aa, Hadronyche versuta
MKFSKLSLTLALILTQALFVLCGKINEDFMKNGLESQALHDEIRKPIDSENPDTERLLDCLLDNRVCSSDRDCCGMTPSCTMGLCVPNVGGLVGDILG

SEQ ID NO: 545 - protein, 97 aa, Hadronyche versuta
MKFSKLSLTLALILTQVLFVLCGKIEDFMKNGLESQALHDEIRKPIDSENPDTERLLDCLLDNRVCSSDKDCCGMTPSCTMGLCVPNVGGLVGGILG

SEQ ID NO: 546 - protein, 93 aa, Hadronyche versuta
MKFSKLSLTLALILTQALFVLCDFMKNGLESQALHDEIRKPIDSENPDTERLLDCLLDNRVCSSDKDCCGMTPSCTMGLCVPNVGGLVGGILG

SEQ ID NO: 547 - protein, 98 aa, Hadronyche versuta
MKFSKLSLTLALILTQALFVLCGKINEDFMKNGLESQALHDEIRKPIDSENPDTERLLDCLLDNRICSSDKDCCGMTPSCTMGLCVPNVGGLVGGILG

SEQ ID NO: 548 - protein, 98 aa, Hadronyche versuta
MKFSKLSLTLALILTQALFVLCGKINEDFMKNGLESQALHDEIRKPIDSENPDTERLLDCLLDNRVCSSDKDCCGMTPSCTMGLCVPNVGGLVGGILG

SEQ ID NO: 549 - protein, 98 aa, Hadronyche versuta
MKFSKLSLTLALILTQAIFVLCGKINEDFMKNDLESQALHDEIRKPINSENPDTERLLDCLLDSRVCSSDKDCCGMTPSCTMGLCVPSVGGLVGGILG

SEQ ID NO: 550 - protein, 96 aa, Atrax robustus
MKFSKLSITLAVILTQAVFVFCGMTNEDFMEKGLESNELPDAIKKPVNSGKPDTKRLLDCVLSRMCFSNANCCGLTPPCKMGLCVPNVGGLLGGIL

SEQ ID NO: 551 - protein, 96 aa, Atrax robustus
MKFSKLSITLAVILTQAVFVFCGMTNEDFMEKGLESNELHDAIKKPVNSGKPDTERLLDCVLSRMCSSDANCCGLTPTCKMGLCVPNVGGLLGGIL

SEQ ID NO: 552 - protein, 101 aa, Hadronyche versuta
MKFSKLSLTLALILTQALFVLCGKINEDFMEHGLESHALHDEIRKPIDTEKADAERLVDCVVNTLGCSSDKDCCGMTPSCTLGICAPSVRGLVGGLLGRAL

SEQ ID NO: 553 - protein, 101 aa, Hadronyche versuta
MKFSKLSLTLALILTQALFVLCMKINEDFMENGLESHALHDEIRKPIDTEKADAERLVDCVVNTLGCSSDKDCCGMTPSCTLGICAPSVGGLVGGLLGRAL

SEQ ID NO: 554 - protein, 101 aa, Hadronyche versuta
MKFSKLSLTFALILTQALFVLCGKINEDFMDNGLESHALHDEIRKPIHTEKADAERLVDCVLNTLGCSSDKDCCGMTPSCTLGICAPSVGGLVGGLLGRAL

SEQ ID NO: 555 - protein, 101 aa, Hadronyche infensa
MKFSKLSLTLALILTQALFVLCGKINEDFMEHGLESHALHDEIRKPIDTEKADAERLVDCVVNTLGCSSDKDCCGMTPSCTLGICAPSVGGLVGGLLGRAL

SEQ ID NO: 556 - protein, 101 aa, Hadronyche infensa
MKFSKLSVTLALILTQTLLVLCGKINEDFMENGLESHALHDEIRKPIDTDKAYAERVLDCVVNTLGCSSDKDCCGMTPSCTLGICAPSVGGLVGGLLGRAL

SEQ ID NO: 557 - protein, 101 aa, Hadronyche versuta
MKFSKLSLTLALILTQALFVLCGKINEDFMENGLESHALHDEIRKPIDTEKADAERLVDCVVNTLGCSSDKDCCGMTPSCTLGICAPSVGGLVGGLLGRAL

SEQ ID NO: 558 - protein, 101 aa, Hadronyche versuta
MKFSKLSLTLALILTQALFVLCGKINEDFMENGLESHALHDEIRKPIDTEKADAERVLDCVVNTLGCSSDKDCCGMTPSCTLGICAPSVGGLVGGLLGRAL

SEQ ID NO: 559 - protein, 100 aa, Hadronyche versuta
MKFSKLSLTLALILTQALFVLCGKINEDFMENGLESHALHDEIRKPIDTEKADAERLVDCVVNTLGCSSDKDCCGMTPSCTLGICAPSVGLVGGLLGRAL

SEQ ID NO: 560 - protein, 97 aa, Atrax robustus
MKFSKLSITLAVILTQAVFVFCGMTNEDFMEKGFKSNDLQYAIKQPVNSGKPDTERLLDCVLSRVCSSDENCCGLTPTCTMGLCVPNVGGLLGGLLS

SEQ ID NO: 561 - protein, 97 aa, Atrax robustus
MKFSKLSITLVVILTQAVFVFCGMTNEDFMEKGFKSNDLQYAIRQPVNSGKPDTERLLDCVLSRVCSSDENCCGLTPTCTMGLCVPNVGGLLGGLLS

SEQ ID NO: 562 - protein, 101 aa, Hadronyche versuta
MKFSKLSLTLALILTQALLVLCGKINEDFMENGLESHALHDEIRKPLDTENPDTERQLDCVLNTLGCSSDKDCCGMTPSCTLGICAPNVGGLVGGLLGRAL

SEQ ID NO: 563 - protein, 101 aa, Hadronyche versuta
MKFSKLSLTLALILTQVLLVVCGKINEDFMENGLESHALHDEIRKPIDTEKADAERVLDCVVNTLGCSSDKDCCGMTPSCTLGICAPSVGGIVGGLLGRAL

SEQ ID NO: 564 - protein, 101 aa, Hadronyche versuta
MKFSKLSLTLALILAQAIFVLCGKINEDFMENGLESHALHDEIRKPIDTEKADAERVVDCVLNTLGCSSDKDCCGMTPSCTLGICAPSVGGLVGGLLGRAL

SEQ ID NO: 565 - protein, 101 aa, Hadronyche versuta
MKFSKLSLTLALILTQALLVVCGKINEDFMENGLESHALHDEIRKPIDTEKADAERVLDCVVNILGCSSDKDCCGMTPSCTLGICAPSVGGIVGGLLGRAL

SEQ ID NO: 566 - protein, 101 aa, Hadronyche versuta
MKFSKLSLTLALILTQALLVVCGKINEDFMENGLESHALHDEIRKPIDTEKADAERVLDCVVNTLGCSSDKDCCGMTPSCTLGICAPSVGGIVGGLLGRAL

SEQ ID NO: 567 - protein, 101 aa, Hadronyche infensa
MKFSKLSLTLALILTQALLVVCGKINEDFMENGLESHALHDEIRKSIDTEKADAERVLDCVVNTLGCSSDKDCCGMTPSCTLGICAPSVGGIVGGLLGRAL

SEQ ID NO: 568 - protein, 95 aa, Hadronyche versuta
MKFSKLSLTFALILTQTLLVLCDFMENGLESHALHDEIRKPIDTEKADAERVLDCVVNTLGCSSDKDCCGMTPSCTLGICAPSVGGLVGGLLGRA

SEQ ID NO: 569 - protein, 76 aa, Hadronyche versuta
MNTATGFIVLLVLATVLGGVEAGESHMRKDAMGRVRRQYCVPVDQPCSLNTQPCCDDATCTQERNENGHTVYYCRA

SEQ ID NO: 570 - protein, 39 aa, Hadronyche versuta; identical to SEQ ID NO: 12

SEQ ID NO: 571 - protein, 39 aa, Hadronyche versuta; identical to SEQ ID NO: 5

SEQ ID NO: 572 - protein, 75 aa, Hadronyche versuta
MNTATGFIVLLVLATILGGIEAGESHMRKDAMGRVRRQYCVPVDQPCSLNTQPCCDDATCTQERNENGHTVYYCR

SEQ ID NO: 573 - protein, 38 aa, Hadronyche versuta
QYCVPVDQPCSLNTQPCCDDATCTQERNENGHTVYYCR

SEQ ID NO: 574 - protein, 75 aa, Hadronyche versuta
MNTATGFIVLLVLATVLGGIEAGESHMRKDAMGRVRRQYCVPVDQPCSLNTQPCCDDATCTQELNENDNTVYYCR

SEQ ID NO: 575 - protein, 38 aa, Hadronyche versuta
QYCVPVDQPCSLNTQPCCDDATCTQELNENDNTVYYCR

SEQ ID NO: 576 - protein, 76 aa, Hadronyche versuta
MNTATGFIVLLVLATILGGIEAGESHMRKDAMGRVRRQYCVPVDQPCSLNTQPCCDDATCTQERNENGHTVYYCRA

SEQ ID NO: 577 - protein, 39 aa, Hadronyche versuta; identical to SEQ ID NO: 12

SEQ ID NO: 578 - protein, 76 aa, Hadronyche versuta
MNTATGFIVLLVLATVLGGIEAGESHMRKDAMGRVRRQYCVPVDQPCSLNTQPCCDDATCTQELNENANPVYYCRA

SEQ ID NO: 579 - protein, 39 aa, Hadronyche versuta; identical to SEQ ID NO: 6

SEQ ID NO: 580 - protein, 76 aa, Hadronyche versuta
MNTTTGFIVLLVLATILGGIEAGESHMRKDAMGRVRRQYCVPVDQPCSLNTQPCCDDATCTQELNENDNTVYYCRA

SEQ ID NO: 581 - protein, 39 aa, Hadronyche versuta
QYCVPVDQPCSLNTQPCCDDATCTQELNENDNTVYYCRA

SEQ ID NO: 582 - protein, 76 aa, Hadronyche versuta
MNTATGFIVLLVLATVLGGIEAGESHMRKDAMGRVRRQYCVPVDQPCSLNTQPCCDDATCTQELNENDNTVYYCRA

SEQ ID NO: 583 - protein, 39 aa, Hadronyche versuta; identical to SEQ ID NO: 581

SEQ ID NO: 584 - protein, 76 aa, Hadronyche versuta
MNTATGFIVFLVLATVLGGIEAGESHMRKDAMGRVRRQYCVPVDQPCSLNTQPCCDDATCTQELNENDNTVYYCRA

SEQ ID NO: 585 - protein, 39 aa, Hadronyche versuta; identical to SEQ ID NO: 581

SEQ ID NO: 586 - protein, 76 aa, Hadronyche versuta
MNTATGFIVLLVLATVLGGIEARESHMRKDAMGRVRRQYCVPVDQPCSLNTQPCCDDATCTQELNENDNTVYYCRA

SEQ ID NO: 587 - protein, 39 aa, Hadronyche versuta; identical to SEQ ID NO: 581

SEQ ID NO: 588 - protein, 37 aa, Hadronyche versuta; identical to SEQ ID NO: 24

SEQ ID NO: 589 - protein, 45 aa, Hadronyche versuta
LLACLFGNGRCSSNRDCCELTPVCKRGSCVSSGPGLVGGILGGIL

SEQ ID NO: 590 - protein, 19 aa, Hadronyche versuta
EDTRADLQGGEAAEKVFRR

SEQ ID NO: 591 - protein, 15 aa, Hadronyche versuta
GESHVREDAMGRARR

SEQ ID NO: 592 - protein, 78 aa, Atrax robustus
MNTATGVIALLVLATVIGCIEAEDTRADLQGGEAAEKVFRRSPTCIPSGQPCPYNENCCSQSCTFKENENGNTVKRCD

SEQ ID NO: 593 - protein, 37 aa, Atrax robustus; identical to SEQ ID NO: 24

SEQ ID NO: 594 - protein, 78 aa, Atrax robustus
MNTATGVIALLVLVTVIGCIEAEDTRADLQGGEAAEKVFRRSPTCIPSGQPCPYNENCCSQSCTFKENENGNTVKRCD

SEQ ID NO: 595 - protein, 37 aa, Atrax robustus; identical to SEQ ID NO: 24

SEQ ID NO: 596 - protein, 78 aa, Atrax robustus
MNTATGVIALLVLATVIGCIEAEDTRADLQGGEAAEKVFRRSPTCIPSGQPCPYNENCCSQSCTFKENETGNTVKRCD

SEQ ID NO: 597 - protein, 37 aa, Atrax robustus
SPTCIPSGQPCPYNENCCSQSCTFKENETGNTVKRCD

SEQ ID NO: 598 - protein, 78 aa, Atrax robustus
MNTATGVIALLVLATVIGCIEAEDTRADLQGGEAAEKVFRRSPTCIPSGQPCPYNENCCSQSCTFKENENANTVKRCD

SEQ ID NO: 599 - protein, 37 aa, Atrax robustus
SPTCIPSGQPCPYNENCCSQSCTFKENENANTVKRCD

SEQ ID NO: 600 - protein, 78 aa, Atrax robustus
MNTATGVIALLVLATVIGCIEAEDTRADLQGGEAAEKVFRRSPTCIPSGQPCPYNENCCSKSCTYKENENGNTVQRCD

SEQ ID NO: 601 - protein, 37 aa, Atrax robustus
SPTCIPSGQPCPYNENCCSKSCTYKENENGNTVQRCD

SEQ ID NO: 602 - protein, 73 aa, Atrax robustus
MNTATGFIVLLVLATVLGCIEAGESHVREDAMGRARRGACTPTGQPCPYNESCCSGSCQEQLNENGHTVKRCV

SEQ ID NO: 603 - protein, 36 aa, Atrax robustus
GACTPTGQPCPYNESCCSGSCQEQLNENGHTVKRCV

SEQ ID NO: 604 - protein, 79 aa, Hadronyche versuta
MNTATGFIVLLVLATVIGCISADFQGGFEPYEGEDAERIFRRSPTCIPTGQPCPYNENCCSQSCTYKANENGNQVKGCD

SEQ ID NO: 605 - protein, 37 aa, Hadronyche versuta
SPTCIPTGQPCPYNENCCSQSCTYKANENGNQVKGCD

SEQ ID NO: 606 - protein, 79 aa, Hadronyche versuta
MNTATGFIVLLVLATVIGCISADFQGGFEPYEEEDAERIFRRSPTCIPTGQPCPYNENCCNQSCTYKANENGNQVKRCD

SEQ ID NO: 607 - protein, 37 aa, Hadronyche versuta
SPTCIPTGQPCPYNENCCNQSCTYKANENGNQVKRCD

SEQ ID NO: 608 - protein, 79 aa, Hadronyche versuta
MNTATGFIVLLVLATVIGCISADFQGGFEPYEEEDAERIFRRSPTCIPTGQPCPYNENCCSQSCTYKANENGNQVKRCD

SEQ ID NO: 609 - protein, 37 aa, Hadronyche versuta
SPTCIPTGQPCPYNENCCSQSCTYKANENGNQVKRCD

SEQ ID NO: 610 - protein, 79 aa, Hadronyche versuta
MNTATGFIVLLVLATVIGCISVDFQGGFESYEEEDAERIFRRSPTCIPTGQPCPYNENCCSQSCTYKANENGNQVKRCD

SEQ ID NO: 611 - protein, 37 aa, Hadronyche versuta; identical to SEQ ID NO: 609

SEQ ID NO: 612 - protein, 78 aa, Hadronyche versuta
MNTATGFIVLLVLATVIGCISADFQGGFESSVEDAERLFRRSSTCIRTDQPCPYNESCCSGSCTYKANENGNQVKRCD

SEQ ID NO: 613 - protein, 37 aa, Hadronyche versuta
SSTCIRTDQPCPYNESCCSGSCTYKANENGNQVKRCD

SEQ ID NO: 614 - protein, 78 aa, Hadronyche versuta
MNTATGFIVLLVLATVIGCISADFQGGFEPYEEEDAERIFRRSTCTPTDQPCPYHESCCSGSCTYKANENGNQVKRCD

SEQ ID NO: 615 - protein, 36 aa, Hadronyche versuta
STCTPTDQPCPYHESCCSGSCTYKANENGNQVKRCD

SEQ ID NO: 616 - protein, 78 aa, Hadronyche versuta
MNTATGFIVLLVLATVIGCISADFEGSFEPYEEEDAERIFRRSTCTPTDQPCPYDESCCSGSCTYKANENGNQVKRCD

SEQ ID NO: 617 - protein, 36 aa, Hadronyche versuta
STCTPTDQPCPYDESCCSGSCTYKANENGNQVKRCD

SEQ ID NO: 618 - protein, 78 aa, Hadronyche versuta
MNTATGFIVLLVLATVIGCISADFQGSFEPYEEEDAERIFRRSTCTPTDQPCPYDESCCSGSCTYKANENGNQVKRCD

SEQ ID NO: 619 - protein, 36 aa, Hadronyche versuta; identical to SEQ ID NO: 617

SEQ ID NO: 620 - protein, 78 aa, Hadronyche versuta
MNTATGFIVLLVLATVIGCISADFQGSFEPYEEEDAERIFRRSTCTPTDQPCPYHESCCSGSCTYKANENGNQVKRCD

SEQ ID NO: 621 - protein, 36 aa, Hadronyche versuta; identical to SEQ ID NO: 615

SEQ ID NO: 622 - protein, 78 aa, Hadronyche versuta
MNTATGFIVLLVLATVIGCISADFQGGFEPYEEEDAERIFRRSTCTPTDQPCPYDESCCSGSCTYKANENGNQVKRCD

SEQ ID NO: 623 - protein, 36 aa, Hadronyche versuta; identical to SEQ ID NO: 617

SEQ ID NO: 624 - protein, 36 aa, Atrax infensus; identical to SEQ ID NO: 615

SEQ ID NO: 625 - protein, 37 aa, Atrax infensus; identical to SEQ ID NO: 609

SEQ ID NO: 626 - protein, 37 aa, Atrax infensus; identical to SEQ ID NO: 613

SEQ ID NO: 627 - protein, 37 aa, Atrax robustus
SSVCIPSGQPCPYNEHCCSGSCTYKENENGNTVQRCD

SEQ ID NO: 628 - protein, 37 aa, Hadronyche versuta; identical to SEQ ID NO: 24

SEQ ID NO: 629 - protein, 37 aa, Atrax formidabillis
SPTCTGADRPCAACCPCCPGTSCKGPEPNGVSYCRND

SEQ ID NO: 630 - protein, 36 aa, Atrax formidabillis
SPTCTGADRPCAACCPCCPGTSCKGPEPNGVSYCRN

SEQ ID NO: 631 - protein, 37 aa, Atrax formidabillis
SPTCIRSGQPCPYNENCCSQSCTFKTNENGNTVKRCD

SEQ ID NO: 632 - protein, 9 aa, Atrax infensus
NGNQVKRCD

SEQ ID NO: 633 - protein, 9 aa, Atrax infensus
NGNQVKRCD

SEQ ID NO: 634 - protein, 9 aa, Hadronyche versutus
NGNTVKRCD

SEQ ID NO: 635 - protein, 15 aa, Hadronyche versutus
SPTCIPSGQPCPYNE

SEQ ID NO: 636 - protein, 16 aa, Agelenopsis aperta
ECVPENGHCRDWYDEC

SEQ ID NO: 637 - protein, 37 aa, Agelenopsis aperta
ECATKNKRCADWAGPWCCDGLYCSCRSYPGCMCRPSS

SEQ ID NO: 638 - protein, 38 aa, Agelenopsis aperta
ADCVGDGQRCADWAGPYCCSGYYCSCRSMPYCRCRSDS

SEQ ID NO: 639 - protein, 37 aa, Agelenopsis aperta
ACVGENQQCADWAGPHCCDGYYCTCRYFPKCICRNNN

SEQ ID NO: 640 - protein, 37 aa, Agelenopsis aperta
ACVGENKQCADWAGPHCCDGYYCTCRYFPKCICRNNN

SEQ ID NO: 641 - protein, 37 aa, Agelenopsis aperta
DCVGESQQCADWAGPHCCDGYYCTCRYFPKCICVNNN

SEQ ID NO: 642 - protein, 36 aa, Hololena curta
SCVGEYGRCRSAYEDCCDGYYCNCSQPPYCLCRNNN

SEQ ID NO: 643 - protein, 38 aa, Hololena curta
ADCVGDGQKCADWFGPYCCSGYYCSCRSMPYCRCRSDS

SEQ ID NO: 644 - protein, 70 aa, Androctonus australis Hector
KKNGYAVDSSGKAPECLLSNYCNNQCTKVHYADKGYCCLLSCYCFGLNDDKKVLEISDTRKSYCDTTIIN

SEQ ID NO: 645 - protein, 70 aa, Androctonus australis Hector
KKNGYAVDSSGKAPECLLSNYCNNECTKVHYADKGYCCLLSCYCFGLNDDKKVLEISDTRKSYCDTTIIN

SEQ ID NO: 646 - protein, 70 aa, Androctonus australis Hector
KKDGYAVDSSGKAPECLLSNYCYNECTKVHYADKGYCCLLSCYCFGLNDDKKVLEISDTRKSYCDTPIIN

SEQ ID NO: 647 - protein, 33 aa, Scorpio maurus palmatus
ALPLSGEYEPCVRPRKCKPGLVCNKQQICVDPK

SEQ ID NO: 648 - protein, 61 aa, Leiurus quinquestriatus
DGYIRKRDGCKLSCLFGNEGCNKECKSYGGSYGYCWTWGLACWCEGLPDEKTWKSETNTCG

SEQ ID NO: 649 - protein, 61 aa, Buthotus judaicus
DGYIRKKDGCKVSCIIGNEGCRKECVAHGGSFGYCWTWGLACWCENLPDAVTWKSSTNTCG

SEQ ID NO: 650 - protein, 39 aa, Atrax robustus
GSSPTCIPSGQPCPYNENCCSQSCTFKENENGNTVKRCD

SEQ ID NO: 651 - protein, 39 aa, Atrax robustus
GSAICTGADRPCAACCPCCPGTSCKAESNGVSYCRKDEP

SEQ ID NO: 652 - protein, 41 aa, Atrax robustus
GSQYCVPVDQPCSLNTQPCCDDATCTQERNENGHTVYYCRA

SEQ ID NO: 653 - protein, 60 aa, Hadronyche versuta
MNTATGFIVLLVLATVLGGVEAGESHMRKDAMGRVRRQYCVPVDQPCSLNTQPCCDDATC

SEQ ID NO: 654 - protein, 39 aa, Hadronyche versuta
QYCVPVDQPCSLNTQPCCDDAYCTQERNENGHTVYYCRA

SEQ ID NO: 655 - protein, 39 aa, Hadronyche versuta; identical to SEQ ID NO: 5

SEQ ID NO: 656 - protein, 74 aa, Hadronyche versuta
MNTATGFIVLLVLATILGGIEAGESHMRKDAMGRVRRQYCVPVDQPCSLNTQPCCDDATCTERNENGHTVYYCR

SEQ ID NO: 657 - protein, 38 aa, Hadronyche versuta; identical to SEQ ID NO: 573

SEQ ID NO: 658 - protein, 75 aa, Hadronyche versuta
MNTATGFIVLLVLATVLGGIEAGESHMRKDAMGRVRRQYCVPVDQPCSLNTQPCCDDAYCTQELNENDNTVYYCR

SEQ ID NO: 659 - protein, 38 aa, Hadronyche versuta; identical to SEQ ID NO: 575

SEQ ID NO: 660 - protein, 76 aa, Hadronyche versuta; identical to SEQ ID NO: 576

SEQ ID NO: 661 - protein, 39 aa, Hadronyche versuta; identical to SEQ ID NO: 12

SEQ ID NO: 662 - protein, 76 aa, Hadronyche versuta; identical to SEQ ID NO: 578

SEQ ID NO: 663 - protein, 39 aa, Hadronyche versuta; identical to SEQ ID NO: 6

SEQ ID NO: 664 - protein, 76 aa, Hadronyche versuta
MNTTTGFIVLLVLATILGGIEAGESHMRKDAMGRVRRQYCVPVDQPCSLNTQPCCDDAYCTQELNENDNTVYYCRA

SEQ ID NO: 665 - protein, 39 aa, Hadronyche versuta; identical to SEQ ID NO: 581

SEQ ID NO: 666 - protein, 76 aa, Hadronyche versuta; identical to SEQ ID NO: 582

SEQ ID NO: 667 - protein, 39 aa, Hadronyche versuta; identical to SEQ ID NO: 581

SEQ ID NO: 668 - protein, 76 aa, Hadronyche versuta; identical to SEQ ID NO: 584

SEQ ID NO: 669 - protein, 39 aa, Hadronyche versuta; identical to SEQ ID NO: 581

SEQ ID NO: 670 - protein, 76 aa, Atrax robustus; identical to SEQ ID NO: 586

SEQ ID NO: 671 - protein, 39 aa, Atrax robustus; identical to SEQ ID NO: 581

SEQ ID NO: 672 - protein, 22 aa, Hadronyche versuta
  MISC_FEATURE (4)..(4): Xaa is Ala, Arg, Asn, Asp, Asx, Cys, Glu, Gln, Glx, Gly, His, Ile, Leu, Lys, Met, Phe, Pro, Ser, Thr, Trp, Tyr, or Val.
  MISC_FEATURE (10)..(10): Xaa is Ala, Arg, Asn, Asp, Asx, Cys, Glu, Gln, Glx, Gly, His, Ile, Leu, Lys, Met, Phe, Pro, Ser, Thr, Trp, Tyr, or Val.
  MISC_FEATURE (16)..(16): Xaa is Ala, Arg, Asn, Asp, Asx, Cys, Glu, Gln, Glx, Gly, His, Ile, Leu, Lys, Met, Phe, Pro, Ser, Thr, Trp, Tyr, or Val.
  MISC_FEATURE (20)..(20): Xaa is Ala, Arg, Asn, Asp, Asx, Cys, Glu, Gln, Glx, Gly, His, Ile, Leu, Lys, Met, Phe, Pro, Ser, Thr, Trp, Tyr, or Val.
MNTXTGFIVXLVLATXLGGXEA

SEQ ID NO: 673 - protein, 15 aa, Hadronyche versuta
  MISC_FEATURE (1)..(1): Xaa is Ala, Arg, Asn, Asp, Asx, Cys, Glu, Gln, Glx, Gly, His, Ile, Leu, Lys, Met, Phe, Pro, Ser, Thr, Trp, Tyr, or Val.
XESHMRKDAMGRVRR

SEQ ID NO: 674 - protein, 64 aa, Leiurus quinquestriatus hebraeus
VRDAYIAKNYNCVYECFRDAYCNELCTKNGASSGYCQWAGKYGNACWCYALPDNVPIRVPGKCR

SEQ ID NO: 675 - protein, 64 aa, Leiurus quinquestriatus quinquestriatus
VRDAYIAKNYNCVYECFRDSYCNDLCTKNGASSGYCQWAGKYGNACWCYALPDNVPIRVPGKCH

SEQ ID NO: 676 - protein, 65 aa, Bothus occitanus tunetanus
VRDAYIAQNYNCVYFCMKDDYCNDLCTKNGASSGYCQWAGKYGNACWCYALPDNVPIRIPGKCHS

SEQ ID NO: 677 - protein, 64 aa, Hottentotta judaica
GRDAYALDNLNCAYTCGSKSYCNTECTKNGAVSGYCQWLGKYGNACWCINLPDKVPIRIPGACR

SEQ ID NO: 678 - protein, 67 aa, Leiurus quinquestriatus hebraeus
VRDGYIAQPENCVYHCFPGSSGCDTLCKEKGGTSGHCGFKVGHGLACWCNALPDNVGIIVEGEKCHS

SEQ ID NO: 679 - protein, 66 aa, Buthus occitanus mardochei
GRDGYIAQPENCVYHCFPGSSGCDTLCKEKGATSGHCGFLPGSGVACWCDNLPNKVPIVVGGEKCH

SEQ ID NO: 680 - protein, 65 aa, Buthus occitanus mardochei
GRDAYIAQPENCVYECAKNSYCNDLCTKNGAKSGYCQWLGKYGNACWCEDLPDNVPIRIPGKCHF

SEQ ID NO: 681 - protein, 64 aa, Bothus martensii Karsch
VRDAYIAKPHNCVYECARNEYCNDLCTKNGAKSGYCQWVGKYGNGCWCIELPDNVPIRVPGKCH

SEQ ID NO: 682 - protein, 64 aa, Bothus martensii Karsch
VRDAYIAKPHNCVYSCARNEWCNDLCTKNGAKSGYCQWVGKYGNGCWCIELPDNVPIRVPGKCH

SEQ ID NO: 683 - protein, 64 aa, Bothus martensii Karsch
VRDAYIAKPENCVYHCAGNEGCNKLCTDNGAESGYCQWGGRYGNACWCIKLPDDVPIRVPGKCH

SEQ ID NO: 684 - protein, 66 aa, Bothus martensii Karsch
VRDGYIALPHNCAYGCLNNEYCNNLCTKDGAKIGYCNIVGKYGNACWCIQLPDNVPIRVPGRCHPA

SEQ ID NO: 685 - protein, 64 aa, Leiurus quinquestriatus
VRDGYIAQPENCVYHCIPDCDTLCKDNGGTGGHCGFKLGHGIACWCNALPDNVGIIVDGVKCHK

SEQ ID NO: 686 - protein, 66 aa, Leiurus quinquestriatus
VRDGYIAKPENCAHHCFPGSSGCDTLCKENGGTGGHCGFKVGHGTACWCNALPDKVGIIVDGVKCH

SEQ ID NO: 687 - protein, 66 aa, Centruroides noxius
KEGYLVDIKNTGCKYECLKLGDNDYCLRECKQQYGKGAGGYCYAFACWCTHLYEQAIVWPLPNKRC

SEQ ID NO: 688 - protein, 66 aa, Centruroides noxius
KEGYLVELGTGCKYECFKLGDNDYCLRECKARYGKGAGGYCYAFGCWCTQLYEQAVVWPLKNKTCR

SEQ ID NO: 689 - protein, 66 aa, Centruroides suffusus suffusus
KEGYLVSKSTGCKYECLKLGDNDYCLRECKQQYGKSSGGYCYAFACWCTHLYEQAVVWPLPNKTCN

SEQ ID NO: 690 - protein, 66 aa, Centruroides suffusus suffusus
KEGYLVNSYTGCKFECFKLGDNDYCLRECRQQYGKGSGGYCYAFGCWCTHLYEQAVVWPLPNKTCN

SEQ ID NO: 691 - protein, 76 aa, Buthotus judaicus
KKNGYPLDRNGKTTECSGVNAIAPHYCNSECTKVYVAESGYCCWGACYCFGLEDDKPIGPMKDITKKYCDVQIIPS

SEQ ID NO: 692 - protein, 70 aa, Androctonus australis Hector; identical to SEQ ID NO: 645

SEQ ID NO: 693 - protein, 70 aa, Leiurus quinquestriatus quinquestriatus
KKNGYAVDSSGKAPECLLSNYCYNECTKVHYADKGYCCLLSCYCVGLSDDKKVLEISDARKKYCDFVTIN

SEQ ID NO: 694 - protein, 70 aa, Leiurus quinquestriatus hebraeus
KKNGFAVDSNGKAPECFFDHYCNSECTKVYYAEKGYCCLLSCYCFGLNDDKKVLEISDTTKKYCDFTIIN

SEQ ID NO: 695 - protein, 72 aa, Bothus martensii Karsch
KKNGYAVDSSGKVAECLFNNYCNNECTKVYYADKGYCCLLKCYCFGLLDDKPVLDIWDSTKNYCDVQIIDLS

SEQ ID NO: 696 - protein, 61 aa, Leiurus quinquestriatus hebraeus
DGYIKRRDGCKVACLIGNEGCDKECKAYGGSYGYCWTWGLACWCEGLPDDKTWKSETNTCG

SEQ ID NO: 697 - protein, 60 aa, Leiurus quinquestriatus hebraeus
DGYIRGDGCKVSCVINHVFCDNECKAAGGSYGYCWAWGLACWCEGLPAEREWKYETNTCG

SEQ ID NO: 698 - protein, 62 aa, Buthotus judaicus
DGYIRKKDGCKVSCIIGNEGCRKECVAHGGSFGYCWTWGLACWCENLPDAVTWKSSTNTCGR

SEQ ID NO: 699 - protein, 61 aa, Buthacus arenicola
DGYIRRRDGCKVSCLFGNEGCDKECKAYGGSYGYCWTWGLACWCEGLPDDKTWKSETNTCG

SEQ ID NO: 700 - protein, 61 aa, Leiurus quinquestriatus quinquestriatus
DGYIRKRDGCKLSCLFGNEGCNKECKSYGGSYGYCWTWGLACWCEGLPDDKTWKSETNTCG

SEQ ID NO: 701 - protein, 60 aa, Bothus occitanus tunetanus
DGYIKGYKGCKITCVINDDYCDTECKAEGGTYGYCWKWGLACWCEDLPDEKRWKSETNTC

SEQ ID NO: 702 - protein, 63 aa, Leiurus quinquestriatus hebraeus
DNGYLLNKATGCKVWCVINNASCNSECKLRRGNYGYCYFWKLACYCEGAPKSELWAYATNKCN

SEQ ID NO: 703 - protein, 62 aa, Tityus serrulatus
KEGYLMDHEGCKLSCFIRPSGYCGRECGIKKGSSGYCYAWPACYCYGLPNWVKVWDRATNKC

SEQ ID NO: 704 - protein, 64 aa, Tityus zulianus
KDGYLVGNDGCKYSCFTRPGTYCANECSRVKGKDGYCYAWMACYCYSMPNWVKTWDRATNRCGR

SEQ ID NO: 705 - protein, 29 aa, Oldenlandia affinis
GLPVCGETCVGGTCNTPGCTCSWPVCTRN

SEQ ID NO: 706 - protein, 29 aa, Oldenlandia affinis
CGETCFGGTCNTPGCSCTWPICTRDGLPV

SEQ ID NO: 707 - protein, 30 aa, Oldenlandia affinis
GTPCGESCVYIPCISGVIGCSCTDKVCYLN

SEQ ID NO: 708 - protein, 10 aa, Artificial Sequence
  Synthetically Created Peptide
YDPAPPPPPP

SEQ ID NO: 709 - protein, 20 aa, Artificial Sequence
  Synthetically Created Peptide
HHHHHHIEGRYDPAPPPPPP

SEQ ID NO: 710 - protein, 8 aa, Artificial Sequence
  Synthetically created peptide
YDPAPPPP

SEQ ID NO: 711 - protein, 6 aa, Artificial Sequence
  Synthetically Created Peptide
YDPAPP

SEQ ID NO: 712 - protein, 5 aa, Artificial Sequence
  Synthetically Created Peptide
YDPAP

SEQ ID NO: 713 - protein, 6 aa, Artificial Sequence
  Synthetically Created Peptide
YDPAPR

SEQ ID NO: 714 - protein, 4 aa, Artificial Sequence
  Synthetically Created Peptide
YDPA

SEQ ID NO: 715 - protein, 5 aa, Artificial Sequence
  Synthetically Created Peptide
YDPAR

SEQ ID NO: 716 - protein, 20 aa, Artificial Sequence
  Synthetically Created Peptide
YDPARYDPARYDPARYDPAR

SEQ ID NO: 717 - protein, 4 aa, Artificial Sequence
  Synthetically Created Peptide
YDPR

SEQ ID NO: 718 - protein, 4 aa, Artificial Sequence
  Synthetically Created Peptide
DPAR

SEQ ID NO: 719 - protein, 16 aa, Artificial Sequence
  Synthetically Created Peptide
DPARDPARDPARDPAR

SEQ ID NO: 720 - protein, 9 aa, Artificial Sequence
  Synthetically Created Peptide
DPAPPPPPP

SEQ ID NO: 721 - protein, 8 aa, Artificial Sequence
  Synthetically Created Peptide
PAPPPPPP

SEQ ID NO: 722 - protein, 33 aa, Scorpio Maurus
GDCLPHLKLCKENKDCCSKKCKRRGTNIEKRCR

SEQ ID NO: 723 - protein, 64 aa, Mesobuthus eupeus
MSTFVVVFLLLTAILCHAEHAIDETARGCNRLNKKCNSDADCCRYGERCISTGVNYYCRPDVGP

SEQ ID NO: 724 - protein, 85 aa, Atrax robustus
MNTATGFIVLLVLATVLGAIEAEDAVPDFEGGFASHAREDTVGGKIRRSSVCIPSGQPCPYNEHCCSGSCTYKENENGNTVQRCD

SEQ ID NO: 725 - protein, 73 aa, Atrax robustus; identical to SEQ ID NO: 602

SEQ ID NO: 726 - protein, 78 aa, Atrax robustus; identical to SEQ ID NO: 592

SEQ ID NO: 727 - protein, 78 aa, Atrax robustus; identical to SEQ ID NO: 600

SEQ ID NO: 728 - protein, 78 aa, Atrax robustus; identical to SEQ ID NO: 596

SEQ ID NO: 729 - protein, 29 aa, Grammostola rosea
YCQKWLWTCDSERKCCEDMVCRLWCKKRL

SEQ ID NO: 730 - protein, 31 aa, Grammostola rosea
YCQKWMWTCDEERKCCEGLVCRLWCKKKIEW

SEQ ID NO: 731 - protein, 32 aa, Ctenus ornatus
APCTYPGQQCKSDDECCHGTCKTAFIGRICMR

SEQ ID NO: 732 - protein, 86 aa, Chilobrachys jingzhao
MKVSVLITLAVLGVMFVWASAAELEERGSDQRDSPAWLKSMERIFQSGERECRKMFGGCSVDSDCCAHLGCKPTLKYCAWDGTFGK

SEQ ID NO: 733 - protein, 29 aa, Chilobrachys jingzhao
YCQKWMWTCDSERKCCEGYVCELWCKYNL

SEQ ID NO: 734 - protein, 62 aa, Chilobrachys jingzhao
MKTSILFVIFSLALLFALSAATEIEETDRACGQFWWKCGEGKPPCCANFACKIGLYLCIWSP

SEQ ID NO: 735 - protein, 63 aa, Chilobrachys jingzhao
MKNTSILFILGLALLLVLAFEAQVGESDGECGGFWWKCGRGKPPCCKGYACSKTWGWCAVEAP

SEQ ID NO: 736 - protein, 83 aa, Chilobrachys jingzhao
MKASVFAVILGLVVLCACSFAEDEQDQFVSPNELLKSMFVESRHEFTPEVEGRYCQKWMWTCDSKRACCEGLRCKLWCRKIIG

SEQ ID NO: 737 - protein, 31 aa, Grammostola rosea
YCQKWMWTCDEERKCCEGLVCRLWCKRIINM

SEQ ID NO: 738 - protein, 82 aa, Grammostola rosea
MKTSVVFVIAGLALLSVVCYASELKEQSSVNEVLSTIFHFEQPEERGCLEFWWKCNPNDDKCCRPKLKCSKLFKLCNFSFGK

SEQ ID NO: 739 - protein, 69 aa, Agelena orientalis
MRAIISLLLISAMVFSMIEAVPVEEGLQLFEGERGGCLPRNKFCNPSSGPRCCSGLTCKELNIWANKCL

SEQ ID NO: 740 - protein, 69 aa, Agelena orientalis
MRAIISLLLISAMVFSMIEAVPLEEGLQLFEGERGCLPRNKFCNPSSGPRCCSGLTCKELNIWDSRCLG

SEQ ID NO: 741 - protein, 68 aa, Agelena orientalis
MRAIISLLLISAMVFSMIEAVPLEEGLQLFEGERGCLPRNKFCNPSSGPRCCSGLTCKELNIWASKCL

SEQ ID NO: 742 - protein, 69 aa, Agelena orientalis
MRAIISLLLISAMVFSMIEAVPVEEGLQLFEGERGGCLPRNKFCNPSSGPRCCSGLTCKELNIWASKCL

SEQ ID NO: 743 - protein, 68 aa, Agelena orientalis
MKAIISLLLISAMVFSMIEAVPLEEGLQLFEGERGCLPHNRFCNALSGPRCCSGLTCKELNIWASKCL

SEQ ID NO: 744 - protein, 70 aa, Agelena orientalis
MKAIISLLLISAMVFSIIEPVPKKKGLQLSENERGGCLPHNKFCNALSGPRCCSGLKCKELTIWNTKCLE

SEQ ID NO: 745 - protein, 70 aa, Agelena orientalis
MRSIISLILISAMVFSMIAPVPEEERLQLSEDERGGCLPHNRFCNALTGPRCCSRLRCKELSIWDSICLG

SEQ ID NO: 746 - protein, 70 aa, Agelena orientalis
  MISC_FEATURE (23)..(23): Xaa is Ala, Arg, Asn, Asp, Asx, Cys, Glu, Gln, Glx, Gly, His, Ile, Leu, Lys, Met, Phe, Pro, Ser, Thr, Trp, Tyr, or Val.
  MISC_FEATURE (24)..(24): Xaa is Ala, Arg, Asn, Asp, Asx, Cys, Glu, Gln, Glx, Gly, His, Ile, Leu, Lys, Met, Phe, Pro, Ser, Thr, Trp, Tyr, or Val.
MRAIISLILISAMVFSMIAAVPXXEGLQLSEDERGGCLPHNRFCNALSGPRCCSGLKCKELSIWDSICLG

SEQ ID NO: 747 - protein, 69 aa, Agelena orientalis
MKAIISLLLISAMVFSMFEAVPVRRRFTAFEGERGCLPHNRFCNALSGPRCCTGLKCKELSIWDSRCLG

SEQ ID NO: 748 - protein, 70 aa, Agelena orientalis
MRAIISLLLISAMVFYIIAAVPEEEGLQLSEDERGGCLPHNRFCNALSGPRCCSGLRCKELSIRDSRCLG

SEQ ID NO: 749 - protein, 70 aa, Agelena orientalis
  MISC_FEATURE (25)..(25): Xaa is Ala, Arg, Asn, Asp, Asx, Cys, Glu, Gln, Glx, Gly, His, Ile, Leu, Lys, Met, Phe, Pro, Ser, Thr, Trp, Tyr, or Val.
MRAIISLFLISAMVFSMIQAVPEEXGLQLSEDERGGCLPHNRFCNALSGPRCCSGLKCKELSIWDSTCLG

SEQ ID NO: 750 - protein, 70 aa, Agelena orientalis
MRAIISLLLISAMVFSIIEAVPEEEGLQLSEDERGGCLPHNRFCNALSDPRCCSGLRCKELSIWDSRCLG

SEQ ID NO: 751 - protein, 70 aa, Agelena orientalis
MRAIISLLLISAMVFSMIAAVPEEEGLQLSEDERGGCLPHNRFCNALSGPRCCSGLRCKELSIWDSTCLG

SEQ ID NO: 752 - protein, 69 aa, Agelena orientalis
  MISC_FEATURE (24)..(24): Xaa is Ala, Arg, Asn, Asp, Asx, Cys, Glu, Gln, Glx, Gly, His, Ile, Leu, Lys, Met, Phe, Pro, Ser, Thr, Trp, Tyr, or Val.
  MISC_FEATURE (25)..(25): Xaa is Ala, Arg, Asn, Asp, Asx, Cys, Glu, Gln, Glx, Gly, His, Ile, Leu, Lys, Met, Phe, Pro, Ser, Thr, Trp, Tyr, or Val.
MKAIISLLLISAMVFSMIEAVPVXXGLQLFESERGCLPHNRFCNALSGPRCCSRLKCKELSIWDSRCLG

SEQ ID NO: 753 - protein, 69 aa, Agelena orientalis
MKAIISLLLISAMVFSMIEAVPLEEGLQLFEGERGCLPHNTFCNALSGPRCCSGLKCKELSIWDSRCLG

SEQ ID NO: 754 - protein, 69 aa, Agelena orientalis
MKAIISLLLISAMVFSMIEAVPVEEGLQLFEGERGCLPHNRFCNALSGPRCCSGLRCKELSIWDSRCLG

SEQ ID NO: 755 - protein, 70 aa, Agelena orientalis
MRAIISLFLISAMVFSMIQAVPEEKGLQLSEDERGGCLPHNRFCNALSGPRCCSRLKCKELSIWDSRCLG

SEQ ID NO: 756 - protein, 69 aa, Agelena orientalis
MRAIISVLLISAMVFSIIEAVPLEEGLQLFEAERVGCLPRNRFCNALSGPRCCSGLRCKELSIWASKCL

SEQ ID NO: 757 - protein, 70 aa, Agelena orientalis
MRAIIYLLLISAMVFSMTKAVPEEEGLQLSEDERGGCLPHNRFCNALSGPRCCSGLKCKELSIYDSRCLG

SEQ ID NO: 758 - protein, 69 aa, Agelena orientalis
MKAIISLLLISAMVFSMIEAVPVEEGLQLFEGERGCLPHNRFCNALSGPRCCSGLKCKELSIWDSRCLG

SEQ ID NO: 759 - protein, 70 aa, Agelena orientalis
MRAIISLILISAMVFSMIAAVPEEEGLQLSEDERGGCLPHNRFCNALSGPRCCSGLRCKELSIWDSRCLG

SEQ ID NO: 760 - protein, 33 aa, Phoneutria nigriventer
VFCRFNGQQCTSDGQCCYGKCRTAFLRMICMGG

SEQ ID NO: 761 - protein, 43 aa, Agelenopsis aperta
  MISC_FEATURE (20)..(20): Xaa is Ala, Arg, Asn, Asp, Asx, Cys, Glu, Gln, Glx, Gly, His, Ile, Leu, Lys, Met, Phe, Pro, Ser, Thr, Trp, Tyr, or Val.
  MISC_FEATURE (40)..(40): Xaa is Ala, Arg, Asn, Asp, Asx, Cys, Glu, Gln, Glx, Gly, His, Ile, Leu, Lys, Met, Phe, Pro, Ser, Thr, Trp, Tyr, or Val.
NCIDFGGDCDGEKDDCQCCXRNGYCSCYNLFGYLKRGCKXEVG

SEQ ID NO: 762 - protein, 39 aa, Missulena bradleyi
SPVCTPSGQPCQPNTQPCCNNAEEEQTINCNGNTVYRCA

SEQ ID NO: 763 - protein, 36 aa, Hadronyche infensa; identical to SEQ ID NO: 615

SEQ ID NO: 764 - protein, 37 aa, Hadronyche versuta; identical to SEQ ID NO: 24

SEQ ID NO: 765 - protein, 37 aa, Hadronyche formidabilis; identical to SEQ ID NO: 631

SEQ ID NO: 766 - protein, 37 aa, Hadronyche infensa; identical to SEQ ID NO: 609

SEQ ID NO: 767 - protein, 37 aa, Hadronyche versuta
SSTCIPSGQPCPYNENCCSQSCTYKENENGNTVKRCD

SEQ ID NO: 768 - protein, 37 aa, Hadronyche infensa; identical to SEQ ID NO: 613

SEQ ID NO: 769 - protein, 37 aa, Hadronyche versuta
SSTCIPSGQPCPYNENCCSQSCTFKENENGNTVKRCD

SEQ ID NO: 770 - protein, 37 aa, Hadronyche versuta; identical to SEQ ID NO: 601

SEQ ID NO: 771 - protein, 37 aa, Hadronyche versuta
SPTCIPSGQPCPYNENCCSQSCTYKENENGNTVKRCD

SEQ ID NO: 772 - protein, 37 aa, Hadronyche versuta
SAVCIPSGQPCPYSKYCCSGSCTYKTNENGNSVQRCD

SEQ ID NO: 773 - protein, 45 aa, Hadronyche versuta; identical to SEQ ID NO: 589

SEQ ID NO: 774 - protein, 32 aa, Phoneutria nigriventer
VFCRSNGQQCTSDGQCCYGKCMTAFMGKICMR

SEQ ID NO: 775 - protein, 32 aa, Phoneutria reidyi
AFCRFNGQQCTSDGQCCNGRCINAFQGRICIG

SEQ ID NO: 776 - protein, 33 aa, Ceratogyrus marshalli
DCLGWFKSCDPKNDKCCKNYTCSRRDRWCKYDL

SEQ ID NO: 777 - protein, 39 aa, Aphonopelma sp
IFECVFSCDIEKEGKPCKPKGEKKCTGGWKCKIKLCLKI

SEQ ID NO: 778 - protein, 29 aa, Grammostola rosea
YCQKWMWTCDSKRKCCEDMVCQLWCKKRL

SEQ ID NO: 779 - protein, 35 aa, Heteroscodra maculata
ECRYLFGGCSSTSDCCKHLSCRSDWKYCAWDGTFS

SEQ ID NO: 780 - protein, 35 aa, Psalmopoeus cambridgei
SECRWFMGGCDSTLDCCKHLSCKMGLYYCAWDGTF

SEQ ID NO: 781 - protein, 34 aa, Stromatopelma calceatum griseipes
TCRYLFGGCKTTADCCKHLACRSDGKYCAWDGTF

SEQ ID NO: 782 - protein, 34 aa, Stromatopelma calceatum
DCTRMFGACRRDSDCCPHLGCKPTSKYCAWDGTI

SEQ ID NO: 783 - protein, 35 aa, Theraphosa blondi
AACLGMFESCDPNNDKCCPNRECNRKHKWCKYKLW

SEQ ID NO: 784 - protein, 32 aa, Phoneutria keyserlingi
AFCKYNGEQCTSDGQCCNGRCRTAFMGKICMG

SEQ ID NO: 785 - protein, 35 aa, Phoneutria nigriventer
MPCPKILKQCKSDEDCCRGWKCFGFSIKDKMCISR

SEQ ID NO: 786 - protein, 40 aa, Phoneutria reidyi
ECADVYKEVWYPEKPCCKDRACQCSLGMNCKCKATLGDIF

SEQ ID NO: 787 - protein, 31 aa, Phoneutria nigriventer
VFCRFNGQQCTSDGQCCYGKCRTAFMGKICM

SEQ ID NO: 788 - protein, 36 aa, Phoneutria nigriventer
IACAPRFSLCNSDKECCKGLRCKSRIANMWPTFCSQ

SEQ ID NO: 789 - protein, 36 aa, Phoneutria reidyi
IACAPRGLLCFRDKECCKGLTCKGRFVNTWPTFCLV

SEQ ID NO: 790 - protein, 32 aa, Phoneutria nigriventer
SFCIPFKPCKSDENCCKKFKCKTTGIVKLCRW

SEQ ID NO: 791 - protein, 33 aa, Ceratogyrus marshalli
DCLGWFKSCDPKNDKCCKNYTCSRRDRWCKYYL

SEQ ID NO: 792 - protein, 39 aa, Aphonopelma sp
IFECVFSCDIEKEGKPCKPKGEKKCSGGWKCKIKLCLKI

SEQ ID NO: 793 - protein, 38 aa, Heteroscodra maculata
ECRYFWGECNDEMVCCEHLVCKEKWPITYKICVWDRTF

SEQ ID NO: 794 - protein, 35 aa, Psalmopoeus cambridgei
GACRWFLGGCKSTSDCCEHLSCKMGLDYCAWDGTF

SEQ ID NO: 795 - protein, 35 aa, Theraphosa blondi
DDCLGMFSSCDPKNDKCCPNRVCRSRDQWCKYKLW

SEQ ID NO: 796 - protein, 36 aa, Phoneutria keyserlingi
IACAPRGQLCFSDKLCCIGLRCKSRVANMWPTFCLV

SEQ ID NO: 797 - protein, 34 aa, Phoneutria nigriventer
  MISC_FEATURE (31)..(31): Xaa is Ala, Arg, Asn, Asp, Asx, Cys, Glu, Gln, Glx, Gly, His, Ile, Leu, Lys, Met, Phe, Pro, Ser, Thr, Trp, Tyr, or Val.
GCANAYKSCNGPHTCCWGYNGYKKACICSGXNWK

SEQ ID NO: 798 - protein, 39 aa, Ceratogyrus marshalli
GVDKEGCRKLLGGCTIDDDCCPHLGCNKKYWHCGWDGTF

SEQ ID NO: 799 - protein, 34 aa, Paraphysa scrofa
DCLGFLWKCNPSNDKCCRPNLVCSRKDKWCKYQI

SEQ ID NO: 800 - protein, 34 aa, Psalmopoeus cambridgei
ECRWYLGGCKEDSECCEHLQCHSYWEWCLWDGSF

SEQ ID NO: 801 - protein, 35 aa, Theraphosa blondi
DDCLGMFSSCDPNNDKCCPNRVCRVRDQWCKYKLW

SEQ ID NO: 802 - protein, 41 aa, Hysterocrates gigas
GVDKAGCRYMFGGCSVNDDCCPRLGCHSLFSYCAWDLTFSD

SEQ ID NO: 803 - protein, 37 aa, Heteropoda venatoria
DDDCGWIMDDCTSDSDCCPNWVCSKTGFVKNICKYEM

SEQ ID NO: 804 - protein, 36 aa, Heteropoda venatoria
ADCGWLFHSCESNADCCENWACATTGRFRYLCKYQI

SEQ ID NO: 805 - protein, 35 aa, Agelena orientalis
GGCLPHNRFCNALSGPRCCSGLKCKELSIWDSRCL

SEQ ID NO: 806 - protein, 70 aa, Agelena orientalis
MRAIISLFLISAMVFSMIQAVPEEEGLQLSEDERGGCLPHNRFCNALSGPRCCSGLKCKELSIWDSRCLG

SEQ ID NO: 807 - protein, 88 aa, Latrodectus tredecimguttatus
MSKLFFVVFLCLIISVFAISPADIGCTDISQADFDEKNNNCIKCGEDGFGEEMVNRCRDKCFTDNFYQSCVDLLNKVYEEKDTPPVQE

SEQ ID NO: 808 - protein, 33 aa, Phoneutria nigriventer
GFCAQKGIKCHDIHCCTNLKCVREGSNRVCRKA

SEQ ID NO: 809 - protein, 86 aa, Psalmopoeus cambridgei
MMRVLIVTAVFTFFLVLTSSGHDEDNEQRNILEGMFLDRAIETPKGLEEKRACGILHDNCVYVPAQNPCCRGLQCRYGKCLVQVGR

SEQ ID NO: 810 - protein, 65 aa, Psalmopoeus cambridgei
MGFKLVLFIAVLTLVGSSNAEISAKMDSRDSPMIQERRCLPAGKTCVRGPMRVPCCGSCSQNKCT

SEQ ID NO: 811 - protein, 36 aa, Plesiophrictus guangxiensis
DGECGGFWWKCGSGKPACCPKYVCSPKWGLCNFPMP

SEQ ID NO: 812 - protein, 36 aa, Plesiophrictus guangxiensis
EGECGGFWWKCGSGKPACCPKYVCSPKWGLCNFPMP

SEQ ID NO: 813 - protein, 33 aa, Plesiophrictus guangxiensis
ECRKMFGGCSVDSDCCAHLGCKPTLKYCAWDGT

SEQ ID NO: 814 - protein, 68 aa, Haplopelma huwenum
MNMKILVLVAVLCLVVSTHAERHSKTDMEDMEDSPMIQERKCLPPGKPCYGATQKIPCCGVCSHNKCT

SEQ ID NO: 815 - protein, 55 aa, Haplopelma huwenum
IDTCRLPSDRGRCKASFERWYFNGRTCAKFIYGGCGGNGNKFPTQEACMKRCAKA

SEQ ID NO: 816 - protein, 81 aa, Haplopelma huwenum
MRASMFLALAGLVLLFVVCYASESEEKEFPRELLFKFFAVDDFKGEERACKGVFDACTPGKNECCPNRVCSDKHKWCKWKL

SEQ ID NO: 817 - protein, 85 aa, Haplopelma huwenum
MKVTLIAILTCAAVLVLHTTAAEELEAESQLMEVGMPDTELAAVDEERLFECSFSCEIEKEGDKPCKKKKCKGGWKCKFNMCVKV

SEQ ID NO: 818 - protein, 37 aa, Haplopelma huwenum
LFECSFSCEQEKEGDKPCKKKKCKGGWKCKFNMCVKV

SEQ ID NO: 819 - protein, 87 aa, Haplopelma huwenum
MVNMKASMFLTFAGLVLLFVVCYASESEEKEFPKEMLSSIFAVDNDFKQEERDCAGYMRECKEKLCCSGYVCSSRWKWCVLPAPWRR

SEQ ID NO: 820 - protein, 89 aa, Haplopelma huwenum
MVNMKASMFLALAGLVLLFVVCYASESEEKEFSNELLSSVLAVDDNSKGEERECLEIFKACNPSNDQCCKSSKLVCSRKTRWCKYQIGK

SEQ ID NO: 821 - protein, 86 aa, Haplopelma huwenum
MKSIVFVALFGLALLAVVCSASEDAHKELLKEVVRAMVVDKTDAVQAEERECRWYLGGCSQDGDCCKHLQCHSNYEWCVWDGTFSK

SEQ ID NO: 822 - protein, 41 aa, Haplopelma huwenum
NCIGEQVPCDENDPRCCSGLVVLKKTLHGIWIKSSYCYKCK

SEQ ID NO: 823 - protein, 83 aa, Haplopelma huwenum
MKVTLIAILTCAAVLVLHTTAAEELEESQLMEVGMPDTELAAVDEERLFECSISCEIEKKGESCKPKKCKGGWKCKFNMCVKV

SEQ ID NO: 824 - protein, 34 aa, Haplopelma huwenum
IICAPEGGPCVAGIGCCAGLRCSGAKLGLAGSCQ

SEQ ID NO: 825 - protein, 33 aa, Haplopelma hainanum
ECKGFGKSCVPGKNECCSGYACNSRDKWCKVLL

SEQ ID NO: 826 - protein, 33 aa, Haplopelma hainanum
GCKGFGDSCTPGKNECCPNYACSSKHKWCKVYL

SEQ ID NO: 827 - protein, 35 aa, Haplopelma hainanum
ECLGFGKGCNPSNDQCCKSSNLVCSRKHRWCKYEI

SEQ ID NO: 828 - protein, 35 aa, Haplopelma hainanum
ECLGFGKGCNPSNDQCCKSANLVCSRKHRWCKYEI

SEQ ID NO: 829 - protein, 35 aa, Grammostola rosea
ECRYLFGGCKTTSDCCKHLGCKFRDKYCAWDFTFS

SEQ ID NO: 830 - protein, 35 aa, Grammostola rosea
ECRYLFGGCKTTADCCKHLGCKFRDKYCAWDFTFS

SEQ ID NO: 831 - protein, 33 aa, Heteropoda venatoria
DCGTIWHYCGTDQSECCEGWKCSRQLCKYVIDW

SEQ ID NO: 832 - protein, 30 aa, Heteropoda venatoria
DDCGKLFSGCDTNADCCEGYVCRLWCKLDW

SEQ ID NO: 833 - protein, 31 aa, Heteropoda venatoria
ECGTLFSGCSTHADCCEGFICKLWCRYERTW

SEQ ID NO: 834 - protein, 29 aa, Heteropoda venatoria
DDCGTLFSGCDTSKDCCEGYVCHLWCKYK

SEQ ID NO: 835 - protein, 83 aa, Haplopelma huwenum
MKTSMFLTLTGLGLLFVVCYASESEEKEFPKELLSSIFAADSDFKVEERGCLGDKCDYNNGCCSGYVCSRTWKWCVLAGPWRR

SEQ ID NO: 836 - protein, 77 aa, Macrothele gigas
MKVFSFTVVVVMILSLSAFVLAGDEGDVMKKIVAMEEAVEERACLAEYQKCEGSTVPCCPGLSCSAGRFRKTKLCTK

SEQ ID NO: 837 - protein, 81 aa, Macrothele gigas
MKAPATIVILIMSLISVLWATADTEDGNLLFPIEDFIRKFDEYPVQPKERSCKLTFWRCKKDKECCGWNICTGLCIPPGKK

SEQ ID NO: 838 - protein, 38 aa, Macrothele gigas
CMGYDIHCTDRLPCCFGLECVKTSGYWWYKKTYCRRKS

SEQ ID NO: 839 - protein, 121 aa, Macrothele gigas
MMTLSPFLLLLIAAVVIGNASEGEVKNEFEERLKDEFKDPSRSEVAEVILLRELEVLEETLFGKEMTSDTEENRNSREKRCMGYDIECNENLPCCKHRKLECVETSGYWWYKRKYCRPIKG

SEQ ID NO: 840 - protein, 79 aa, Macrothele gigas
MKAPATTLILVMSLISVLWATPDLEEGDLLAELGDLIATDDEYPMKPEERGCKLTFWKCKNKKECCGWNACALGICMPR

SEQ ID NO: 841 - protein, 77 aa, Macrothele gigas
MKVFSFTIGLVVIISLFAFALAYDEETDLMKKLVEMERAIEQRIICAPEGGPCVVGIGCCKGYSCAPGLLGLVGHCQ

SEQ ID NO: 842 - protein, 81 aa, Macrothele gigas
MKYVMVILGLLVLAAICCASEVEELDWRQEIARAILEAELQPEERDCKGLFRQCKKSSECCKGSSCESDLTGLCIFNLPGR

SEQ ID NO: 843 - protein, 80 aa, Macrothele gigas
MKFATFAFTLCVVISLSVLVLADEEEKDFLMNLIQPLKESEERQFCGTNGKPCVNGQCCGALRCVVTYHYADGVCLKMNP

SEQ ID NO: 844 - protein, 39 aa, Brachypelma albiceps
ILECVFSCDIKKEGKPCKPKGEKKCTGGWRCKIKLCLKI

SEQ ID NO: 845 - protein, 39 aa, Brachypelma smithi; identical to SEQ ID NO: 792

SEQ ID NO: 846 - protein, 29 aa, Paraphysa scrofa
YCQKWMWTCDSARKCCEGLVCRLWCKKII

SEQ ID NO: 847 - protein, 40 aa, Psalmopoeus cambridgei
EDCIPKWKGCVNRHGDCCEGLECWKRRRSFEVCVPKTPKT

SEQ ID NO: 848 - protein, 39 aa, Brachypelma albiceps
IFECVFSCDIKKEGKPCKPKGEKKCTGGWRCKIKLCLKI

SEQ ID NO: 849 - protein, 31 aa, Paraphysa scrofa; identical to SEQ ID NO: 737

SEQ ID NO: 850 - protein, 34 aa, Brachypelma smithi
SCVDFQTKCKKDSDCCGKLECSSRWKWCVYPSPF

SEQ ID NO: 851 - protein, 32 aa, Apomastus schleringi
WLGCARVKEACGPWEWPCCSGLKCDGSECHPQ

SEQ ID NO: 852 - protein, 35 aa, Thrixopelma pruriens
ECRYWLGGCSAGQTCCKHLVCSRRHGWCVWDGTFS

SEQ ID NO: 853 - protein, 30 aa, Thrixopelma pruriens
YCQKWMWTCDSERKCCEGMVCRLWCKKKLW

SEQ ID NO: 854 - protein, 99 aa, Macrothele gigas
TSQGTTPDKVQLEVNCISNLPNNEVEETDLLRELEMIEENLFGKELSFVPEENRNSRHKRCMGYDIECNERLHCCADLECVKTSGRWWYKKTYCRRKSG

SEQ ID NO: 855 - protein, 29 aa, Macrothele raveni
GCKLTFWKCKNKKECCGWNACALGICMPR

SEQ ID NO: 856 - protein, 30 aa, Heteropoda venatoria
DDCGGLFSGCDSNADCCEGYVCRLWCKYKL

SEQ ID NO: 857 - protein, 31 aa, Coremiocnemis valida
ACSRAGENCYKSGRCCDGLYCKAYVVTCYKP

SEQ ID NO: 858 - protein, 34 aa, Grammostola rosea
ECGKFMWKCKNSNDCCKDLVCSSRWKWCVLASPF

SEQ ID NO: 859 - protein, 32 aa, Grammostola rosea
YCQKWMWTCDEERKCCEGLVCRLWCKKKIEEG

SEQ ID NO: 860 - protein, 34 aa, Grammostola rosea
DCLGWFKGCDPDNDKCCEGYKCNRRDKWCKYKLW

SEQ ID NO: 861 - protein, 36 aa, Grammostola rosea
DCVRFWGKCSQTSDCCPHLACKSKWPRNICVWDGSV

SEQ ID NO: 862 - protein, 85 aa, Haplopelma huwenum
MKVTLIAILTCAAVLVLHTTAAEELEAESQLMEVGMPDTELAAVDEERPFECSFSCEIEKEGDKPCKKKKCKGGWKCKFNMCVKV

SEQ ID NO: 863 - protein, 88 aa, Haplopelma huwenum
MGIARILSAVLFLSVLFVVTFPALLSADHHDGRIDTCRLPSDRGRCKASFERWYFNGRTCAKFIYGGCGGNGNKFPTQEACMKRCGKA

SEQ ID NO: 864 - protein, 99 aa, Lasiodora sp
MNTIQVIIFAVVLVLTVTVGQADEDSPEASLLRKLKEAEASLFGQNLEESRNSRQKRCGGVDAPCDKDRPDCCSYAECLRPSGYGWWHGTYYCYRKRER

SEQ ID NO: 865 - protein, 81 aa, Haplopelma huwenum
MKASMFLALAGLVLLFVVCYASESEEKEFPRELLSKIFAVDDFKGEERACKGVFDACTPGKNECCSNRVCSDKHKWCKWKL

SEQ ID NO: 866 - protein, 102 aa, Hadronyche infensa
MKFSKLSLTLALILTQAIFVLCGKINEDFMENGLESHALHDEIRKPIDTEKADAERGVVDCVLNTLGCSSDKDCCGMTPSCTLGICAPSVGGLVGGLLGRAL

SEQ ID NO: 867 - protein, 102 aa, Hadronyche infensa
MKFSKLSLTLALILTQALLVVCGKINEDFMENGLESHALHDEIRKPIDTEKADAERGVLDCVVNTLGCSSDKDCCGMTPSCTLGICAPSVGGIVGGLLGRAL

SEQ ID NO: 868 - protein, 99 aa, Brachypelma smithi
MNTIQVIIFAVVLVLTVTVGQADEDSAETSLLRKLEEAEAAMFGQYLEESKNSREKRCIGESVPCDKDDPRCCREYECLKPTGYGWWYASYYCYRKKSG

SEQ ID NO: 869 - protein, 81 aa, Haplopelma huwenum
MKASMFLAFAGLVLLFVVCYASESEEKEFPRELISKIFAVDDFKGEERACKGVFGACTPGKNECCPNRVCSDKHKWCKWKL

SEQ ID NO: 870 - protein, 84 aa, Haplopelma huwenum
MKVTLIAILTCAAVLVLHTTAAEELEAESQLMEVGMPDTELAAVDEERLFECSISCEIEKKGESCKPKECKGGWKCKFNMCVKV

SEQ ID NO: 871 - protein, 83 aa, Haplopelma huwenum
MKTSMFLTLTGLVLLFVVCYASESEEKEFPKELLSSIFAADSDFKEEERGCFGYKCDYYKGCCSGYVCSPTWKWCVRPGPGRR

SEQ ID NO: 872 - protein, 85 aa, Haplopelma huwenum
MKVTLIAILTCAAVLVLHTTAAEELEAESQLMEVGMPDTELAAVDEERLFECSFSCEIEKEGDKLCKKKKCKGGWKCKFNMCVKV

SEQ ID NO: 873 - protein, 88 aa, Latrodectus tredecimguttatus
MLKLICIAFLVTVLTLVAGQDSLDPAEFGCADDVNQAELLKNNDICLQCEDLHKEGVVFSLCKTNCFTTEYFQHCVKDLEEAKKEPPE

SEQ ID NO: 874 - protein, 37 aa, Atrax robustus; identical to SEQ ID NO: 627

SEQ ID NO: 875 - protein, 76 aa, Atrax robustus; identical to SEQ ID NO: 582

SEQ ID NO: 876 - protein, 78 aa, Atrax robustus; identical to SEQ ID NO: 594

SEQ ID NO: 877 - protein, 39 aa, Brachypelma smithi
IIECVFSCDIEKEGKPCKPKGEKKCSGGWKCKIKLCLKI

SEQ ID NO: 878 - protein, 83 aa, Hadronyche venenata
MNTATGVIALLVLATVIGCIEAETRADLQGAFESYEGEAAEKIFRRSPTCIPSGQPCPYNENCCSKSCTYKEMKTATPVQRCD

SEQ ID NO: 879 - protein, 84 aa, Hadronyche venenata
MNTATGVIALVVLATVIGCIEAEETRADLQGAFESYEGEAADKIFRRSPTCIPSGQPCPYNENCCSKSCTYKENENGNTVQRCD

SEQ ID NO: 880 - protein, 84 aa, Hadronyche venenata
MNTATGVIALLVLATVIGCIEAEETRADLQGAFESYEGEGADKIFRRSPTCIPSGQPCPYNENCCSKSCTYKENENGNTVQRCD

SEQ ID NO: 881 - protein, 84 aa, Hadronyche venenata
MNTATGVIALLVLATVIGCIEVEETRADLQGAFESYEGEAAEKIFRRSPTCIPSGQPCPYNENCCSKSCTYKENENGNTVQRCD

SEQ ID NO: 882 - protein, 84 aa, Hadronyche venenata
MNTATGVIALLVLATVIGCIEAEETRADLQGAFESYEGEAADKIFRRSPTCIPSGQPCPYNENCCSKSCTYKENENGNTVQRCD

SEQ ID NO: 883 - protein, 84 aa, Hadronyche venenata
MNTATGVIALLVLATVIGCIEAEDTRADLQGGLESYEGEAADKIFRRSPTCIPSGQPCPYNENCCSKSCTYKENENGNTVQRCD

SEQ ID NO: 884 - protein, 76 aa, Hadronyche versuta; identical to SEQ ID NO: 582

SEQ ID NO: 885 - protein, 76 aa, Hadronyche versuta; identical to SEQ ID NO: 580

SEQ ID NO: 886 - protein, 76 aa, Hadronyche versuta; identical to SEQ ID NO: 584

SEQ ID NO: 887 - protein, 65 aa, Haplopelma huwenum
MNMKILVLVAVLCLVVSTHAERHSKTDMEDSPMIQERKCLPPGKPCYGATQKIPCCGVCSHNKCT

SEQ ID NO: 888 - protein, 32 aa, Haplopelma huwenum
DCAGYMRECKEKLCCSGYVCSSRWKWCVLPAP

SEQ ID NO: 889 - protein, 33 aa, Haplopelma huwenum
ECRWYLGGCSQDGDCCKHLQCHSNYEWCVWDGT

SEQ ID NO: 890 - protein, 83 aa, Haplopelma huwenum
MKTSMFLTLTGLVLLFVVCYASESEEKDFPKELLSSIFAADSDFKVEERGCLGDKCDYNNGCCSGYVCSRTWKWCVLAGPWRR

SEQ ID NO: 891 - protein, 81 aa, Haplopelma huwenum
MKASMFLTFAGLVLLFVVCYASESEEKEFPRELISKIFAVDDFKGEERACKGVFDACTPGKNECCPNRVCSDKHKWCKWKL

SEQ ID NO: 892 - protein, 81 aa, Haplopelma huwenum
MKASMFLAFAGLALLFVVCYASESEEKEFPRELISKIFAVDDFKGEERACKGVFDACTPGKNECCPNRVCSDKHKWCKWKL

SEQ ID NO: 893 - protein, 81 aa, Haplopelma huwenum
MKASMFLAFAGLVLLFVVCYASESEEKEFPRELISKIFAVDDFKGEERACKGVFDACTPGKNECCPNRVCSDKHKWCKWKL

SEQ ID NO: 894 - protein, 81 aa, Haplopelma huwenum
MEASMFLAFAGLVLLFVVCYASESEEKEFPRELISKIFAVDDFKGEERACKGVFDACTPGKNECCPNRVCSDKHKWCKWKL

SEQ ID NO: 895 - protein, 81 aa, Haplopelma huwenum
MKASMFLAFAGLVLLFVVCYASESEEKELPRELLSKIFAVDDFKGEERACKGVFDACTPGKNECCPNRVCSDKHKWCKWKL

SEQ ID NO: 896 - protein, 81 aa, Haplopelma huwenum
MKASMFLALAGLVLLFVVCYASESEEKEFPRELLSKIFAVDDFKGEERACKGVFDACTPGKNECCPNRVCSDKHKWCKWKL

SEQ ID NO: 897 - protein, 83 aa, Haplopelma huwenum; identical to SEQ ID NO: 890

SEQ ID NO: 898 - protein, 83 aa, Haplopelma huwenum
MKTSMFLTLTGLVLLFVDCYASESEEKEFPKELLSSIFAADSDFKVEERGCLGDKCDYNNGCCSGYVCSRTWKWCVLAGPWRR

SEQ ID NO: 899 - protein, 83 aa, Haplopelma huwenum
MKTSMFLTLTGLVLLFVVCYASESEEKEFPKELPSSIFAADSDFKVEERGCLGDKCDYNNGCCSGYVCSRTWKWCVLAGPWRR

SEQ ID NO: 900 - protein, 83 aa, Haplopelma huwenum
MKTSMFLTLTGLVLLFVVCYASESEEKEFPKELLSSIFAADSDFKVEERGCLGDKCDYNNGCCSGYVCSRTWKWCVLAGPWRR

SEQ ID NO: 901 - protein, 83 aa, Haplopelma huwenum
MQTSMFLTLTGLVLLFVVCYASESEEKEFPKELLSSIFAADSDFKEEERGCFGYKCDYYKGCCSGYVCSPTWKWCVRPGPGRR

SEQ ID NO: 902 - protein, 83 aa, Haplopelma huwenum
MKTSMFLTLTGLVLLFVVCYASESEEKEFPKELLSSIFAADSDFKVEERGCLGDKCDYNNGCCSGYVCSRTWKWCVLAGPWCR

SEQ ID NO: 903 - protein, 83 aa, Haplopelma huwenum
MKTSMFLTLTGLVLLFVVCYASESEEKEFPKELLSSIFAADSDFKVEERGCLGDKCDYNNGCCSGYVCPRTWKWCVLAGPWRR

SEQ ID NO: 904 - protein, 84 aa, Haplopelma huwenum
MKVTLIAILTCAAVLVLHTTAAEELEESQLMEVGMPDTELAAVDEERLFECSFSCEIEKEGDKPCKKKKCKGGWKCKFNMCVKV

SEQ ID NO: 905 - protein, 85 aa, Haplopelma huwenum
MKVTLIAILTCAAVLVLHTTAAEELEAESQLMEVGMPDTESAAVDEERLFECSFSCEIEKEGDKPCKKKKCKGGWKCKFNMCVKV

SEQ ID NO: 906 - protein, 84 aa, Haplopelma huwenum
MKVTLIAILTCAAVLVLHTTAAEELEESQLMEVGMPDTELAAVDEERPFECSFSCEIEKEGDKPCKKKKCKGGWKCKFNMCVKV

SEQ ID NO: 907 - protein, 84 aa, Haplopelma huwenum
MKVTLIAFLTCAAVLVLHTTAAEELEAESQLMEVGMPDTELAAVDEERLFECSISCEIEKKGESCKPKKCKGGWKCKFNMCVKV

SEQ ID NO: 908 - protein, 84 aa, Haplopelma huwenum
MKVTLIAILTCAAVLVLHTTAAEELEAESQLMEVGMPDTELAAVDEERLFECSISCEIEKKGESCKPKKCKGGWKCKFNMCVKV

SEQ ID NO: 909 - protein, 83 aa, Haplopelma huwenum; identical to SEQ ID NO: 823

SEQ ID NO: 910 - protein, 88 aa, Haplopelma huwenum
MGIARILSAVLFLSVLFVVTFPALLSADHRDGRIDTCRLPSDRGRCKASFERWYFNGRTCAKFIYGGCGGNGNKFPTQEACMKRCAKA

SEQ ID NO: 911 - protein, 85 aa, Haplopelma huwenum
MKVTLIAILTCAAVLVLHTTAAEELEAESQLMEVGMPDTELAAVDEERLFECSFSCEIEKEGDKPCKKKKCKGGWKCKFNMCVKF

SEQ ID NO: 912 - protein, 88 aa, Haplopelma huwenum
MGIARILSAVLFLSVLFVVTFPALLSADHHDGRIDTCRLPSDRGRCKASFERWYFNGRTCAKFIYGGCGGNGNKFPTQEACMKRCAKA

SEQ ID NO: 913 - protein, 78 aa, Hadronyche infensa; identical to SEQ ID NO: 614

SEQ ID NO: 914 - protein, 78 aa, Hadronyche infensa; identical to SEQ ID NO: 620

SEQ ID NO: 915 - protein, 79 aa, Hadronyche infensa; identical to SEQ ID NO: 608

SEQ ID NO: 916 - protein, 79 aa, Hadronyche infensa; identical to SEQ ID NO: 610

SEQ ID NO: 917 - protein, 79 aa, Hadronyche infensa
MNTATGFIVLLVLATVIGCISTDFQGGFEPYEEEDAERIFRRSPTCIPTGQPCPYNENCCSQSCTYKANENGNQVKRCD

SEQ ID NO: 918 - protein, 79 aa, Hadronyche infensa
MNTATGFIVLLVLATVIGCISADFQGGFEPYEEEDAQRIFRRSPTCIPTGQPCPYNENCCSQSCTYKANENGNQVKRCD

SEQ ID NO: 919 - protein, 78 aa, Hadronyche infensa; identical to SEQ ID NO: 612

SEQ ID NO: 920 - protein, 79 aa, Hadronyche infensa; identical to SEQ ID NO: 606

SEQ ID NO: 921 - protein, 79 aa, Hadronyche infensa; identical to SEQ ID NO: 604

SEQ ID NO: 922 - protein, 79 aa, Hadronyche infensa
MNTATGFIVLLVLATVIGCISADFQGGFEPYEEEDAERIFRRSPTCIPTGQPCPYNENCCSQSCTYKTNENGNQVKGCD

SEQ ID NO: 923 - protein, 78 aa, Hadronyche infensa; identical to SEQ ID NO: 616

SEQ ID NO: 924 - protein, 78 aa, Hadronyche infensa; identical to SEQ ID NO: 622

SEQ ID NO: 925 - protein, 78 aa, Hadronyche infensa; identical to SEQ ID NO: 618

SEQ ID NO: 926 - protein, 37 aa, Heriaeus melloteei
GCIPYGKTCEFWSGPWCCAGKCKLNVWSMTLSCTRNF

SEQ ID NO: 927 - protein, 40 aa, Heriaeus melloteei
GCIPSFGECAWFSGESCCTGICKWVFFTSKFMCRRVWGKD

SEQ ID NO: 928 - protein, 35 aa, Agelena orientalis
KGCLPRNRFCNALSGPRCCSGLRCKELSIWASKCL

SEQ ID NO: 929 - protein, 35 aa, Agelena orientalis
GGCLPHNRFCNALSGPRCCSGLTCKELNIWASKCL

SEQ ID NO: 930 - protein, 29 aa, Eucratoscelus constrictus
YCQKFLWTCDTERKCCEDMVCELWCKLEK

SEQ ID NO: 931 - protein, 86 aa, Haplopelma huwenum
MKASMFLALAGLVLLFVVCYASESEEKEFSNELLSSVLAVDDNSKGEERECLEIFKACNPSNDQCCKSSKLVCSRKTRWCKYQIGK

SEQ ID NO: 932 - protein, 86 aa, Haplopelma huwenum
MKASMFLALAGLVQLFVVCYASESEEKEFSNELLSSVLAVDDNSKGEERECLEIFKACNPSNDQCCKSSKLVCSRKTRWCKYQIGK

SEQ ID NO: 933 - protein, 81 aa, Haplopelma huwenum
MKASMFLAFAGLVLLFVVCYASESEEKEFPRELISKIFAVDDFKGEERACKGVFDACTPGKNECCPNRVCSDEHKWCKWKL

SEQ ID NO: 934 - protein, 86 aa, Chilobrachys jingzhao
MKVSLLITLAVLGVMFVWASAAELQERGSDQKDSPAWLKSMERIFQSEERECKKMFGGCTVHSDCCAHLGCKPTLKYCAWDGTFGK

SEQ ID NO: 935 - protein, 83 aa, Chilobrachys jingzhao
MKGSAFAIILGLVVLCACSFAEDEQDQFASPNELLRSMFLESRHELIPEVEGRYCQKWMWTCDSERKCCEGYVCELWCKYNMG

SEQ ID NO: 936 - protein, 63 aa, Chilobrachys jingzhao
MKNTSILFILGLALLLVLAFEVQVGESDGECGGFWWKCGSGKPACCPKYVCSPKWGLCNFPMP

SEQ ID NO: 937 - protein, 86 aa, Chilobrachys jingzhao
MKVSVLITLAVLGVMFVWASAAELEERGSDHRDSPAWLKSMERIFQSEERECRKMFGGCSVHSDCCAHLGCKPTLKYCAWDGTFGK

SEQ ID NO: 938 - protein, 77 aa, Chilobrachys jingzhao
MKTSVLLVILGIAAITVQCTASESVEQDSLRTFVDTVLGWNAEMASEARCGGWMAKCADSDDCCETFHCTRFNVCGK

SEQ ID NO: 939 - protein, 77 aa, Chilobrachys jingzhao
MKTSVLLVILGIAAITVQCTASESVEQDSLRTFVDAVLGWNAEMASEARCGGWMAKCADSDDCCETFHCTRFNVCGK

SEQ ID NO: 940 - protein, 77 aa, Chilobrachys jingzhao
MKTSVLLVILGIAAITVQCTASESVEQDSLRTFVDAVLGWNAEMASEARCGGWMAKCADSDDCCEAFHCTRFNVCGK

SEQ ID NO: 941 - protein, 77 aa, Chilobrachys jingzhao
MNTSDPPAVLRIAAITLLCTASESVEQNPLIPFENAVLGSYAKMASEKRCDGWMAKCPDRDDCCETFHCTRFNARGN

SEQ ID NO: 942 - protein, 87 aa, Chilobrachys jingzhao
MKVLVLITLAVLGAMFVWTSAAELEERGSDQRDSPAWVKSMERIFQSEERACREWLGGCSKDADCCAHLECRKKWPYHCVWDWTVRK

SEQ ID NO: 943 - protein, 78 aa, Chilobrachys jingzhao
MKTSVLVTVLGLAVISVLCSASQDEEQDMYDELLSAVFEVNDELQSEARCGEKNDRCKTNQDCCSGFRCTKFRRCGRR

SEQ ID NO: 944 - protein, 85 aa, Chilobrachys jingzhao
MKVSVLITLAVLGVMFVWASAAELEERGSDQRDSPAWLKSMERIFQSEERECRKMFGGCSVDSDCCAHLGCKPTLKYCAWDLTFP

SEQ ID NO: 945 - protein, 86 aa, Chilobrachys jingzhao
MKVSVLITLAVLGVMFVWTSAAELEERGSDQRDSPAWLKSMERIFQSEERECRKMFGGCSVDSDCCAHLGCKPTLKYCAWDGTFGK

SEQ ID NO: 946 - protein, 86 aa, Chilobrachys jingzhao
MKASVLITLAVLGVMFVWASAAELEERGSDQRDSPAWLKSMERIFQSEERECRKMFGGCSVDSDCCAHLGCKPTLKYCAWDGTFGK

SEQ ID NO: 947 - protein, 86 aa, Chilobrachys jingzhao
MKVSVVITLAVLGVMFVWASAAELEERGSDQRDSPAWLKSMERIFQSEERECRKMFGGCSVDSDCCAHLGCKPTLKYCAWDGTFGK

SEQ ID NO: 948 - protein, 86 aa, Chilobrachys jingzhao
MKVSVLITLAVLGVMFVWASAAELEERGSDQRDSPAWLKSMERIFRSEERECRKMFGGCSVDSDCCAHLGCKPTLKYCAWDGTFGK

SEQ ID NO: 949 - protein, 86 aa, Chilobrachys jingzhao
MKVSVLITLAVLGVMFVWASAAELEERGSDQRDSPAWLKSMERIFQSEERECRKMFGGCSVDSDCCAHLGCKPTLKYCAWDGTFGK

SEQ ID NO: 950 - protein, 83 aa, Chilobrachys jingzhao
MKGSAFAIILGLVVLCACSFAEDEQDQFASPNELLRSMFLESRHELIPEVEGRYCQKWMWTCDSERKCCEGYVCELWCKYNLG

SEQ ID NO: 951 - protein, 62 aa, Chilobrachys jingzhao; identical to SEQ ID NO: 734

SEQ ID NO: 952 - protein, 62 aa, Chilobrachys jingzhao
MKTSILFVIFSLALVFALSPATEIEETDRACGQFWWKCGEGKPPCCANFACKIGLYLCIWSP

SEQ ID NO: 953 - protein, 63 aa, Chilobrachys jingzhao
MKSTSILFILGLALLLVLAFEVQVGESDGECGGFWWKCGSGKPACCPKYVCSPKWGLCNFPMP

SEQ ID NO: 954 - protein, 77 aa, Chilobrachys jingzhao
MKTSVLLVILGIAAITVQCTASESVKQDSLRTFVDAVLGWNAEMASEARCGGWMAKCADSDDCCETFHCTRFNVCGK

SEQ ID NO: 955 - protein, 50 aa, Chilobrachys jingzhao
MYDEILSAFFEVNDELQSEARCGEKNDRCKTNQDCCSGFRCTKFRRCGRR

SEQ ID NO: 956 - protein, 35 aa, Grammostola rosea
GCLEFWWKCNPNDDKCCRPKLKCSKLFKLCNFSSG

SEQ ID NO: 957 - protein, 39 aa, Aphonopelma sp.
LFECVLSCDIKKNGKPCKPKGEKKCSGGWRCKINFCLKV

SEQ ID NO: 958 - protein, 78 aa, Atrax robustus; identical to SEQ ID NO: 598

SEQ ID NO: 959 - protein, 98 aa, Hadronyche versuta
MKFSKLSLTLALILTQAIFVLCGKINEDFMKNDLESQALHDEIRKPIDSENPDTERLLDCLLDNRVCSSDKDCCGMTPSCTMGLCVPSVGGLVGGILG

SEQ ID NO: 960 - protein, 98 aa, Atrax robustus; identical to SEQ ID NO: 535

SEQ ID NO: 961 - protein, 98 aa, Hadronyche versuta; identical to SEQ ID NO: 537

SEQ ID NO: 962 - protein, 98 aa, Hadronyche versuta; identical to SEQ ID NO: 538

SEQ ID NO: 963 - protein, 98 aa, Hadronyche versuta; identical to SEQ ID NO: 539

SEQ ID NO: 964 - protein, 98 aa, Hadronyche versuta; identical to SEQ ID NO: 540

SEQ ID NO: 965 - protein, 93 aa, Hadronyche versuta; identical to SEQ ID NO: 541

SEQ ID NO: 966 - protein, 98 aa, Hadronyche versuta; identical to SEQ ID NO: 543

SEQ ID NO: 967 - protein, 98 aa, Atrax robustus; identical to SEQ ID NO: 542

SEQ ID NO: 968 - protein, 98 aa, Hadronyche versuta; identical to SEQ ID NO: 544

SEQ ID NO: 969 - protein, 98 aa, Hadronyche versuta; identical to SEQ ID NO: 549

SEQ ID NO: 970 - protein, 96 aa, Atrax robustus; identical to SEQ ID NO: 550

SEQ ID NO: 971 - protein, 98 aa, Hadronyche versuta; identical to SEQ ID NO: 547

SEQ ID NO: 972 - protein, 98 aa, Hadronyche versuta; identical to SEQ ID NO: 548

SEQ ID NO: 973 - protein, 93 aa, Hadronyche versuta; identical to SEQ ID NO: 546

SEQ ID NO: 974 - protein, 97 aa, Hadronyche versuta; identical to SEQ ID NO: 545

SEQ ID NO: 975 - protein, 96 aa, Atrax robustus; identical to SEQ ID NO: 551

SEQ ID NO: 976 - protein, 101 aa, Hadronyche versuta; identical to SEQ ID NO: 552

SEQ ID NO: 977 - protein, 101 aa, Hadronyche versuta; identical to SEQ ID NO: 553

SEQ ID NO: 978 - protein, 101 aa, Hadronyche versuta; identical to SEQ ID NO: 554

SEQ ID NO: 979 - protein, 101 aa, Hadronyche versuta; identical to SEQ ID NO: 557

SEQ ID NO: 980 - protein, 101 aa, Hadronyche versuta; identical to SEQ ID NO: 558

SEQ ID NO: 981 - protein, 100 aa, Hadronyche infensa
MKFSKLSLTLALILTQALFVLCGKINEDFMEHGLESHALHDEIRKPITEKADAERLVDCVVNTLGCSSDKDCCGMTPSCTLGICAPSVGGLVGGLLGRAL

SEQ ID NO: 982 - protein, 101 aa, Hadronyche infensa; identical to SEQ ID NO: 556

SEQ ID NO: 983 - protein, 100 aa, Hadronyche versuta; identical to SEQ ID NO: 559

SEQ ID NO: 984 - protein, 97 aa, Atrax robustus; identical to SEQ ID NO: 560

SEQ ID NO: 985 - protein, 97 aa, Atrax robustus; identical to SEQ ID NO: 561

SEQ ID NO: 986 - protein, 101 aa, Hadronyche versuta; identical to SEQ ID NO: 562

SEQ ID NO: 987 - protein, 101 aa, Hadronyche versuta; identical to SEQ ID NO: 563

SEQ ID NO: 988 - protein, 101 aa, Hadronyche versuta; identical to SEQ ID NO: 564

SEQ ID NO: 989 - protein, 101 aa, Hadronyche versuta; identical to SEQ ID NO: 565

SEQ ID NO: 990 - protein, 101 aa, Hadronyche versuta; identical to SEQ ID NO: 566

SEQ ID NO: 991 - protein, 101 aa, Hadronyche versuta; identical to SEQ ID NO: 567

SEQ ID NO: 992 - protein, 95 aa, Hadronyche versuta; identical to SEQ ID NO: 568

SEQ ID NO: 993 - protein, 29 aa, Eucratoscelus constrictus
YCQKFLWTCDTERKCCEDMVCELWCKYKE

SEQ ID NO: 994 - protein, 29 aa, Eucratoscelus constrictus
YCQFKMWTCDSERKCCEDMVCRLWCKLNL

SEQ ID NO: 995 - protein, 63 aa, Agelena orientalis
LLLISAMVGSMIAAVPEEESLQLSEDERGGCLPHNRFCNALSGPRCCSGLTCKELNIWASKCL

SEQ ID NO: 996 - protein, 27 aa, Conus amadis
  MISC_FEATURE (27)..(27): Xaa is Ala, Arg, Asn, Asp, Asx, Cys, Glu, Gln, Glx, Gly, His, Ile, Leu, Lys, Met, Phe, Pro, Ser, Thr, Trp, Tyr, or Val.
CKQAGESCDIFSQNCCVGTCAFICIEX

SEQ ID NO: 997 - protein, 28 aa, Conus catus
  MISC_FEATURE (28)..(28): Xaa is Ala, Arg, Asn, Asp, Asx, Cys, Glu, Gln, Glx, Gly, His, Ile, Leu, Lys, Met, Phe, Pro, Ser, Thr, Trp, Tyr, or Val.
CKSKGAKCSKLMYDCCSGSCSGTVGRCX

SEQ ID NO: 998 - protein, 33 aa, Conus ermineus
  MISC_FEATURE (6)..(6): Xaa is Ala, Arg, Asn, Asp, Asx, Cys, Glu, Gln, Glx, Gly, His, Ile, Leu, Lys, Met, Phe, Pro, Ser, Thr, Trp, Tyr, or Val.
  MISC_FEATURE (33)..(33): Xaa is Ala, Arg, Asn, Asp, Asx, Cys, Glu, Gln, Glx, Gly, His, Ile, Leu, Lys, Met, Phe, Pro, Ser, Thr, Trp, Tyr, or Val.
DDCIKXYGFCSLPILKNGLCCSGACVGVCADLX

SEQ ID NO: 999 - protein, 33 aa, Conus ermineus; identical to SEQ ID NO: 998
  MISC_FEATURE (6)..(6): Xaa is Ala, Arg, Asn, Asp, Asx, Cys, Glu, Gln, Glx, Gly, His, Ile, Leu, Lys, Met, Phe, Pro, Ser, Thr, Trp, Tyr, or Val.
  MISC_FEATURE (33)..(33): Xaa is Ala, Arg, Asn, Asp, Asx, Cys, Glu, Gln, Glx, Gly, His, Ile, Leu, Lys, Met, Phe, Pro, Ser, Thr, Trp, Tyr, or Val.

SEQ ID NO: 1000 - protein, 34 aa, Conus geographus
ACSGRGSRCPPQCCMGLRCGRGNPQKCIGAHEDV

SEQ ID NO: 1001 - protein, 23 aa, Conus geographus
  MISC_FEATURE (23)..(23): Xaa is Ala, Arg, Asn, Asp, Asx, Cys, Glu, Gln, Glx, Gly, His, Ile, Leu, Lys, Met, Phe, Pro, Ser, Thr, Trp, Tyr, or Val.
RDCCTPPRKCKDRRCKPMKCCAX

SEQ ID NO: 1002 - protein, 28 aa, Conus geographus
  MISC_FEATURE (28)..(28): Xaa is Ala, Arg, Asn, Asp, Asx, Cys, Glu, Gln, Glx, Gly, His, Ile, Leu, Lys, Met, Phe, Pro, Ser, Thr, Trp, Tyr, or Val.
CKSPGSSCSPTSYNCCRSCNPYTKRCYX

SEQ ID NO: 1003 - protein, 23 aa, Conus geographus
  MISC_FEATURE (23)..(23): Xaa is Ala, Arg, Asn, Asp, Asx, Cys, Glu, Gln, Glx, Gly, His, Ile, Leu, Lys, Met, Phe, Pro, Ser, Thr, Trp, Tyr, or Val.
RDCCTPPKKCKDRQCKPQRCCAX

SEQ ID NO: 1004 - protein, 23 aa, Conus geographus
  MISC_FEATURE (23)..(23): Xaa is Ala, Arg, Asn, Asp, Asx, Cys, Glu, Gln, Glx, Gly, His, Ile, Leu, Lys, Met, Phe, Pro, Ser, Thr, Trp, Tyr, or Val.
RDCCTPPKKCKDRQCKPQRCCAX

SEQ ID NO: 1005 - protein, 28 aa, Conus geographus
  MISC_FEATURE (28)..(28): Xaa is Ala, Arg, Asn, Asp, Asx, Cys, Glu, Gln, Glx, Gly, His, Ile, Leu, Lys, Met, Phe, Pro, Ser, Thr, Trp, Tyr, or Val.
CKSPGSSCSPTSYNCCRSCNPYTKRCYX

SEQ ID NO: 1006 - protein, 28 aa, Conus geographus
  MISC_FEATURE (28)..(28): Xaa is Ala, Arg, Asn, Asp, Asx, Cys, Glu, Gln, Glx, Gly, His, Ile, Leu, Lys, Met, Phe, Pro, Ser, Thr, Trp, Tyr, or Val.
CKSPGSSCSPTSYNCCRSCNPYTKRCYX

SEQ ID NO: 1007 - protein, 23 aa, Conus geographus
  MISC_FEATURE (23)..(23): Xaa is Ala, Arg, Asn, Asp, Asx, Cys, Glu, Gln, Glx, Gly, His, Ile, Leu, Lys, Met, Phe, Pro, Ser, Thr, Trp, Tyr, or Val.
RDCCTPPKKCKDRQCKPQRCCAX

SEQ ID NO: 1008 - protein, 23 aa, Conus geographus
  MISC_FEATURE (23)..(23): Xaa is Ala, Arg, Asn, Asp, Asx, Cys, Glu, Gln, Glx, Gly, His, Ile, Leu, Lys, Met, Phe, Pro, Ser, Thr, Trp, Tyr, or Val.
RDCCTPPKKCKDRQCKPQRCCAX

SEQ ID NO: 1009 - protein, 28 aa, Conus gloriamaris
  MISC_FEATURE (28)..(28): Xaa is Ala, Arg, Asn, Asp, Asx, Cys, Glu, Gln, Glx, Gly, His, Ile, Leu, Lys, Met, Phe, Pro, Ser, Thr, Trp, Tyr, or Val.
SCNNSCQSHSDCASHCICTFRGCGAVNX

SEQ ID NO: 1010 - protein, 17 aa, Conus kinoshitai
  MISC_FEATURE (17)..(17): Xaa is Ala, Arg, Asn, Asp, Asx, Cys, Glu, Gln, Glx, Gly, His, Ile, Leu, Lys, Met, Phe, Pro, Ser, Thr, Trp, Tyr, or Val.
CCNCSSKWCRDHSRCCX

SEQ ID NO: 1011 - protein, 26 aa, Conus magus
  MISC_FEATURE (26)..(26): Xaa is Ala, Arg, Asn, Asp, Asx, Cys, Glu, Gln, Glx, Gly, His, Ile, Leu, Lys, Met, Phe, Pro, Ser, Thr, Trp, Tyr, or Val.
CKGKGAKCSRLMYDCCTGSCRSGKCX

SEQ ID NO: 1012 - protein, 26 aa, Conus magus
  MISC_FEATURE (26)..(26): Xaa is Ala, Arg, Asn, Asp, Asx, Cys, Glu, Gln, Glx, Gly, His, Ile, Leu, Lys, Met, Phe, Pro, Ser, Thr, Trp, Tyr, or Val.
CKGKGAKCSRLMYDCCTGSCRSGKCX

SEQ ID NO: 1013 - protein, 26 aa, Conus magus
  MISC_FEATURE (26)..(26): Xaa is Ala, Arg, Asn, Asp, Asx, Cys, Glu, Gln, Glx, Gly, His, Ile, Leu, Lys, Met, Phe, Pro, Ser, Thr, Trp, Tyr, or Val.
CKGKGAKCSRLMYDCCTGSCRSGKCX

SEQ ID NO: 1014 - protein, 26 aa, Conus magus
  MISC_FEATURE (26)..(26): Xaa is Ala, Arg, Asn, Asp, Asx, Cys, Glu, Gln, Glx, Gly, His, Ile, Leu, Lys, Met, Phe, Pro, Ser, Thr, Trp, Tyr, or Val.
CKGKGAKCSRLMYDCCTGSCRSGKCX

SEQ ID NO: 1015 - protein, 26 aa, Conus magus
  MISC_FEATURE (26)..(26): Xaa is Ala, Arg, Asn, Asp, Asx, Cys, Glu, Gln, Glx, Gly, His, Ile, Leu, Lys, Met, Phe, Pro, Ser, Thr, Trp, Tyr, or Val.
CKGKGAKCSRLMYDCCTGSCRSGKCX

SEQ ID NO: 1016 - protein, 31 aa, Conus marmoreus
ACSKKWEYCIVPILGFVYCCPGLICGPFVCV

SEQ ID NO: 1017 - protein, 15 aa, Conus marmoreus
DWEYHAHPKPNSFWT

SEQ ID NO: 1018 - protein, 16 aa, Conus marmoreus
CCAPSACRLGCRPCCR

SEQ ID NO: 1019 - protein, 16 aa, Conus marmoreus
CCAPSACRLGCRPCCR

SEQ ID NO: 1020 - protein, 28 aa, Conus purpurascens
  MISC_FEATURE (28)..(28): Xaa is Ala, Arg, Asn, Asp, Asx, Cys, Glu, Gln, Glx, Gly, His, Ile, Leu, Lys, Met, Phe, Pro, Ser, Thr, Trp, Tyr, or Val.
CRIPNQKCFQHLDDCCSRKCNRFNKCVX

SEQ ID NO: 1021 - protein, 25 aa, Conus purpurascens
  MISC_FEATURE (25)..(25): Xaa is Ala, Arg, Asn, Asp, Asx, Cys, Glu, Gln, Glx, Gly, His, Ile, Leu, Lys, Met, Phe, Pro, Ser, Thr, Trp, Tyr, or Val.
HPPCCLYGKCRRYPGCSSASCCQRX

SEQ ID NO: 1022 - protein, 28 aa, Conus purpurascens
  MISC_FEATURE (28)..(28): Xaa is Ala, Arg, Asn, Asp, Asx, Cys, Glu, Gln, Glx, Gly, His, Ile, Leu, Lys, Met, Phe, Pro, Ser, Thr, Trp, Tyr, or Val.
CRIPNQKCFQHLDDCCSRKCNRFNKCVX

SEQ ID NO: 1023 - protein, 25 aa, Conus purpurascens
  MISC_FEATURE (25)..(25): Xaa is Ala, Arg, Asn, Asp, Asx, Cys, Glu, Gln, Glx, Gly, His, Ile, Leu, Lys, Met, Phe, Pro, Ser, Thr, Trp, Tyr, or Val.
HPPCCLYGKCRRYPGCSSASCCQRX

SEQ ID NO: 1024 - protein, 25 aa, Conus purpurascens
  MISC_FEATURE (25)..(25): Xaa is Ala, Arg, Asn, Asp, Asx, Cys, Glu, Gln, Glx, Gly, His, Ile, Leu, Lys, Met, Phe, Pro, Ser, Thr, Trp, Tyr, or Val.
GPPCCLYGSCRPFPGCYNALCCRKX

SEQ ID NO: 1025 - protein, 23 aa, Conus purpurascens
  MISC_FEATURE (23)..(23): Xaa is Ala, Arg, Asn, Asp, Asx, Cys, Glu, Gln, Glx, Gly, His, Ile, Leu, Lys, Met, Phe, Pro, Ser, Thr, Trp, Tyr, or Val.
QRLCCGFPKSCRSRQCKPHRCCX

SEQ ID NO: 1026 - protein, 22 aa, Conus stercusmuscarum
QRCCNGRRGCSSRWCRDHSRCC

SEQ ID NO: 1027 - protein, 26 aa, Conus striatus
  MISC_FEATURE (26)..(26): Xaa is Ala, Arg, Asn, Asp, Asx, Cys, Glu, Gln, Glx, Gly, His, Ile, Leu, Lys, Met, Phe, Pro, Ser, Thr, Trp, Tyr, or Val.
CKAAGKPCSRIAYNCCTGSCRSGKCX

SEQ ID NO: 1028 - protein, 27 aa, Conus striatus
  MISC_FEATURE (27)..(27): Xaa is Ala, Arg, Asn, Asp, Asx, Cys, Glu, Gln, Glx, Gly, His, Ile, Leu, Lys, Met, Phe, Pro, Ser, Thr, Trp, Tyr, or Val.
CKLKGQSCRKTSYDCCSGSCGRSGKCX

SEQ ID NO: 1029 - protein, 21 aa, Conus striatus
  MISC_FEATURE (21)..(21): Xaa is Ala, Arg, Asn, Asp, Asx, Cys, Glu, Gln, Glx, Gly, His, Ile, Leu, Lys, Met, Phe, Pro, Ser, Thr, Trp, Tyr, or Val.
QNCCNGGCSSKWCRDHARCCX

SEQ ID NO: 1030 - protein, 26 aa, Conus textile
CKQADEPCDVFSLDCCTGICLGVCMW

SEQ ID NO: 1031 - protein, 27 aa, Conus textile
WCKQSGEMCNLLDQNCCDGYCIVLVCT

SEQ ID NO: 1032 - protein, 30 aa, Conus tulipa
SCSGRDSRCPPVCCMGLMCSRGKCVSIYGE

SEQ ID NO: 1033 - protein, 23 aa, Conus tulipa
  MISC_FEATURE (23)..(23): Xaa is Ala, Arg, Asn, Asp, Asx, Cys, Glu, Gln, Glx, Gly, His, Ile, Leu, Lys, Met, Phe, Pro, Ser, Thr, Trp, Tyr, or Val.
RHGCCKGPKGCSSRECRPQHCCX

SEQ ID NO: 1034 - protein, 21 aa, Striated cone
  MISC_FEATURE (21)..(21): Xaa is Ala, Arg, Asn, Asp, Asx, Cys, Glu, Gln, Glx, Gly, His, Ile, Leu, Lys, Met, Phe, Pro, Ser, Thr, Trp, Tyr, or Val.
QNCCNGGCSSKWCRDHARCCX

SEQ ID NO: 1035 - protein, 24 aa, Hordeum vulgare
MANKHLSLSLFLVLLGLSASLASG

SEQ ID NO: 1036 - protein, 238 aa, Aequorea victoria; identical to SEQ ID NO: 7

SEQ ID NO: 1037 - protein, 4 aa, Pisum sativum
IGER

SEQ ID NO: 1038 - protein, 305 aa, Hadronyche versuta; identical to SEQ ID NO: 11

SEQ ID NO: 1039 - protein, 282 aa, Hadronyche versuta; identical to SEQ ID NO: 10

SEQ ID NO: 1040 - protein, 61 aa, Hadronyche versuta; identical to SEQ ID NO: 9

SEQ ID NO: 1041 - protein, 38 aa, Hadronyche versuta; identical to SEQ ID NO: 8

SEQ ID NO: 1042 - protein, 41 aa, Hadronyche versuta; identical to SEQ ID NO: 652

SEQ ID NO: 1043 - protein, 32 aa, Phoneutria nigriventer; identical to SEQ ID NO: 774

SEQ ID NO: 1044 - protein, 31 aa, Phoneutria nigriventer; identical to SEQ ID NO: 787

SEQ ID NO: 1045 - protein, 33 aa, Phoneutria nigriventer; identical to SEQ ID NO: 760

SEQ ID NO: 1046 - protein, 35 aa, Allagelena opulenta; identical to SEQ ID NO: 805

SEQ ID NO: 1047 - protein, 68 aa, Cupiennius salei
KDDKNCIPKHHECTNDKKNCCKKGLTKMKCKCFTVADAKGATSERCACDSSLLQKFGFTGLHIIKGLF

SEQ ID NO: 1048 - protein, 80 aa, Calisoga sp.
MKYFVVFCVLIIAVAAFTSAAEDGEVFEENPLEFPKTIQKRCISARYPCSNSKDCCSGNCGTFWTCYIRKDPCSKECLAP

SEQ ID NO: 1049 - protein, 39 aa, Calisoga sp.
CISARYPCSNSKDCCSGNCGTFWTCFIRKDPCSKECLAP

SEQ ID NO: 1050 - protein, 39 aa, Calisoga sp.
CISARYPCSNSKDCCSGSCGIFWTCYLRKDPCSKECLAP

SEQ ID NO: 1051 - protein, 82 aa, Plectreurys tristis
MKHLIFSSALVCALVVCTFAEEQVNVPFLPDERAVKCIGWQETCNGNLPCCNECVMCECNIMGQNCRCNHPKATNECESRRR

SEQ ID NO: 1052 - protein, 61 aa, Plectreurys tristis
EEQVNVPFLPDERAVKCIGWQETCNGQLPCCDGCVMCECNIMGQNCRCNHPKMTSECGSRR

SEQ ID NO: 1053 - protein, 79 aa, Plectreurys tristis
HLILASALICALVVCTFAEEQVNVPFLPDEREVKCIGWQEYCRGNLPCCDDCVMCECNIMGQNCRCNHPRITSECGSRR

SEQ ID NO: 1054 - protein, 45 aa, Plectreurys tristis
AVKCIGWQETCNGNLPCCNECVMCECNIMGQNCRCNHPKATNECE

SEQ ID NO: 1055 - protein, 46 aa, Plectreurys tristis
AVKCIGWQETCNGKLPCCDGCVMCECNIMGQNCRCNHPKATSECES

SEQ ID NO: 1056 - protein, 31 aa, Coremiocnemis valida; identical to SEQ ID NO: 857

SEQ ID NO: 1057 - protein, 85 aa, Haplopelma huwenum; identical to SEQ ID NO: 817

SEQ ID NO: 1058 - protein, 84 aa, Haplopelma huwenum; identical to SEQ ID NO: 904

SEQ ID NO: 1059 - protein, 85 aa, Haplopelma huwenum; identical to SEQ ID NO: 905

SEQ ID NO: 1060 - protein, 37 aa, Haplopelma huwenum; identical to SEQ ID NO: 818

SEQ ID NO: 1061 - protein, 85 aa, Haplopelma huwenum; identical to SEQ ID NO: 862

SEQ ID NO: 1062 - protein, 84 aa, Haplopelma huwenum; identical to SEQ ID NO: 906

SEQ ID NO: 1063 - protein, 85 aa, Haplopelma huwenum; identical to SEQ ID NO: 911

SEQ ID NO: 1064 - protein, 85 aa, Haplopelma huwenum; identical to SEQ ID NO: 872

SEQ ID NO: 1065 - protein, 83 aa, Haplopelma huwenum; identical to SEQ ID NO: 823

SEQ ID NO: 1066 - protein, 84 aa, Haplopelma huwenum; identical to SEQ ID NO: 907

SEQ ID NO: 1067 - protein, 84 aa, Haplopelma huwenum; identical to SEQ ID NO: 908

SEQ ID NO: 1068 - protein, 83 aa, Haplopelma huwenum; identical to SEQ ID NO: 823

SEQ ID NO: 1069 - protein, 84 aa, Haplopelma huwenum; identical to SEQ ID NO: 870

SEQ ID NO: 1070 - protein, 70 aa, Agelena orientalis; identical to SEQ ID NO: 806

SEQ ID NO: 1071 - protein, 35 aa, Allagelena opulenta; identical to SEQ ID NO: 805

SEQ ID NO: 1072 - protein, 63 aa, Cupiennius salei
SDCTLRNHDCTDDRHSCCRSKMFKDVCTCFYPSQAKKELCTCQQPKHLKYIEKGLQKAKDYAT

SEQ ID NO: 1073 - protein, 88 aa, Cupiennius salei
MKVAILILSILVLAVASETIEEYRDDFAVEELERATCAGQDKPCKETCDCCGERGECVCALSYEGKYRCICRQGNFLIAWHKLASCKK

SEQ ID NO: 1074 - protein, 37 aa, Phoneutria nigriventer
CNSKGTPCTNADECCGGKCAYNVWNCIGGGCSKTCGY

SEQ ID NO: 1075 - protein, 46 aa, Apomastus schlingeri
KECMTDGTVCYIHNHNDCCGSCLCSNGPIARPWEMMVGNCMCGPKA

SEQ ID NO: 1076 - protein, 46 aa, Segestria florentina
KECMADETVCYIHNHNNCCGSCLCLNGPYARPWEMLVGNCKCGPKE

SEQ ID NO: 1077 - protein, 46 aa, Segestria florentina
KECMVDGTVCYIHNHNDCCGSCLCLNGPIARPWEMMVGNCKCGPKA

SEQ ID NO: 1078 - protein, 46 aa, Segestria florentina
KECMVDGTVCYIHNHNDCCGSCLCLNGPIARPWKMMVGNCKCGPKA

SEQ ID NO: 1079 - protein, 46 aa, Segestria florentina
KECMVDGTVCYIHNHNDCCGSCLCPNGPLARPWEMLVGNCKCGPKA

SEQ ID NO: 1080 - protein, 46 aa, Segestria florentina
KECMTDETVCYIHNHNDCCGSCLCLNGPIARPWEMMVGNCKCGPKA

SEQ ID NO: 1081 - protein, 46 aa, Segestria florentina
KECMADGTVCYIHNHNDCCGSCLCPNGPLARPWEVLVGNCKCGPKA

SEQ ID NO: 1082 - protein, 92 aa, Segestria florentina
KECMADGTVCYIHNHNDCCGSCLCPNGPLARPWEMLVGNCKCGPKAKECMADGTVCYIHNHNDCCGSCLCPNGPLARPWEMLVGNCKCGPKA

SEQ ID NO: 1083 - protein, 87 aa, Haplopelma huwenum; identical to SEQ ID NO: 819

SEQ ID NO: 1084 - protein, 32 aa, Apomastus schlingeri; identical to SEQ ID NO: 851

SEQ ID NO: 1085 - protein, 49 aa, Plectreurys tristis
GCKGFLVKCDSNSECCKTAIVKGKKKQLSCLCGAWGAGCSCSFRCGNRC

SEQ ID NO: 1086 - protein, 32 aa, Phoneutria nigriventer; identical to SEQ ID NO: 790

SEQ ID NO: 1087 - protein, 54 aa, Phoneutria keyserlingi
ATCAGQDKPCKETCDCCGERGECVCGLSYEGKYRCICRQGTFLIAWYKLASCKK

SEQ ID NO: 1088 - protein, 79 aa, Macrothele gigas; identical to SEQ ID NO: 840

SEQ ID NO: 1089 - protein, 29 aa, Macrothele raveni
GCKLTFWKCKNKKECCGWNACALGICMPR

SEQ ID NO: 1090 - protein, 81 aa, Phoneutria nigriventer
MKVAIVFLSLLVLAFASESIEENREEFPVEESARCADINGACKSDCDCCGDSVTCDCYWSDSCKCRESNFKIGMAIRKKFC

SEQ ID NO: 1091 - protein, 42 aa, Missulena bradleyi
CAKKREWCAKTEDCCCPMKCIYAWYNEQSSCQTTFSGMFKKC

SEQ ID NO: 1092 - protein, 37 aa, Pireneitega luctuosa
GCLGEGEKCADWSGPSCCDGFYCSCRSMPYCRCRNNS

SEQ ID NO: 1093 - protein, 37 aa, Pireneitega luctuosa
ACVGDGQRCASWSGPYCCDGYYCSCRSMPYCRCRNNS

SEQ ID NO: 1094 - protein, 36 aa, Pirenitega luctuosa
ADCLNEGDWCADWSGPSCCGEMWCSCPGFGKCRCKK

SEQ ID NO: 1095 - protein, 37 aa, Pireneitega luctuosa
ACATKNQRCASWAGPYCCDGFYCSCRSYPGCMCRPNS

SEQ ID NO: 1096 - protein, 47 aa, Ancylometes sp.
ATCAGQDKPCKVNCDCCGERGECVCGGPCICRQGNVFIAWSKLMTCK

SEQ ID NO: 1097 - protein, 48 aa, Phoneutria nigriventer
CGDINAACKEDCDCCGYTTACDCYWSKSCKCREAAIVIYTAPKKKLTC

SEQ ID NO: 1098 - protein, 82 aa, Phoneutria nigriventer
MKVAIVFLSLLVLAFASESIEENREEFPVEESARCGDINAACKEDCDCCGYTTACDCYWSKSCKCREAAIVIYTAPKKKLTC

SEQ ID NO: 1099 - protein, 48 aa, Phoneutria nigriventer
CGDINAACKEDCDCCGYTTACDCYWSSSCKCREAAIVIYTAPKKKLTC

SEQ ID NO: 1100 - protein, 82 aa, Phoneutria nigriventer
MKVAILFLSILVLAVASESIEESRDDFAVEELGRATCAGQDQPCKETCDCCGERGECVCGGPCICRQGYFWIAWYKLANCKK

SEQ ID NO: 1101 - protein, 49 aa, Phoneutria nigriventer
ATCAGQDQTCKVTCDCCGERGECVCGGPCICRQGNFLIAAYKLASCKCK

SEQ ID NO: 1102 - protein, 82 aa, Phoneutria nigriventer
MKVAILFLSILVLAVASESIEESRDDFAVEELGRATCAGQDQTCKVTCDCCGERGECVCGGPCICRQGNFLIAWYKLASCKK

SEQ ID NO: 1103 - protein, 47 aa, Phoneutria reidyi
GTCAGQDKPCKETCDCCGERGQCVCEGPCICRQGYFWIAAYKLGNCK

SEQ ID NO: 1104 - protein, 42 aa, Atrax robustus
CAKKRNWCGKNEDCCCPMKCIYAWYNQQGSCQTTITGLFKKC

SEQ ID NO: 1105 - protein, 42 aa, Hadronyche versuta
CAKKRNWCGKTEDCCCPMKCVYAWYNEQGSCQSTISALWKKC

SEQ ID NO: 1106 - protein, 42 aa, Hadronyche versuta
CSRSDGWCGKTEDCCCPMKCIKAWYKQNGNCQNTISAIWKNC

SEQ ID NO: 1107 - protein, 42 aa, Illawara wisharti
CAKKRNWCGKNEDCCCPMKCIYAWYNQQGSCQSTITGLFKKC

SEQ ID NO: 1108 - protein, 105 aa, Macrothele gigas
MKTLVIACVALVLVVVHGEVIEEVNEKQLQESVEEKYSLLQRLEKLDEAITAEENRNSRVRRCGSKRAWCKEKKDCCCGYNCVYAWYNQQSSCERKWKYLFTGEC

SEQ ID NO: 1109 - protein, 70 aa, Macrothele gigas
MKILEKALLENDSAAEEESRNLRTKRCARKRAWCEKTENCCCPMKCIYAWYNGQSSCDHTISTIWTSCPK

SEQ ID NO: 1110 - protein, 37 aa, Hadronyche formidabilis; identical to SEQ ID NO: 629

SEQ ID NO: 1111 - protein, 36 aa, Hadronyche versuta
TICTGADRPCAACCPCCPGTSCQGPESNGVVYCRNF

SEQ ID NO: 1112 - protein, 36 aa, Hadronyche versuta
TICTGADRPCAACCPCCPGTSCQGPEPNGVSYCRND

SEQ ID NO: 1113 - protein, 37 aa, Hadronyche versuta
AICTGADRPCAACCPCCPGTSCKAESNGVSYCRKDEP

SEQ ID NO: 1114 - protein, 74 aa, Hadronyche versuta
MNTATCFIVLLDVATVIGGIEAGESDMRKDVMGLFRRAICTGADRPCAACCPCCPGTSCKAESNGVSYCRKDEP

SEQ ID NO: 1115 - protein, 74 aa, Hadronyche versuta
MNTATCFIVLLVVATVIGGIEAGEFDMRKDVMGLFRRAICTGADRPCAACCPCCPGTSCKAESNGVSYCRKDEP

SEQ ID NO: 1116 - protein, 74 aa, Hadronyche versuta
MNTATCFIVFLVVATVIGGIEAGESDMRKDVMGLFRRAICTGADRPCAACCPCCPGTSCKAESNGVSYCRKDEP

SEQ ID NO: 1117 - protein, 74 aa, Hadronyche versuta
MNTATCFIVLLVVATVIGGIEAGESDMRKDVMGLFRRVICTGADSPCAACCPCCPGTSCKAESNGVSYCRKDEP

SEQ ID NO: 1118 - protein, 74 aa, Hadronyche versuta
MNTATCFIVLLVVATVIGGIEAGEFDMRKDVMGLFRRAICPGADRPCAACCPCCPGTSCKAESNGVFYCRKDEP

SEQ ID NO: 1119 - protein, 29 aa, Eucratoscelus constrictus
YCQKFLWTCDTERKCCEDMVCELWCKLEK

SEQ ID NO: 1120 - protein, 29 aa, Eucratoscelus constrictus
YCQKFLWTCDTERKCCEDMVCELWCKYKE

SEQ ID NO: 1121 - protein, 36 aa, Agelenopsis aperta
ECVPENGHCRDWYDECCEGFYCSCRQPPKCICRNNN

SEQ ID NO: 1122 - protein, 37 aa, Agelenopsis aperta; identical to SEQ ID NO: 637

SEQ ID NO: 1123 - protein, 38 aa, Agelenopsis aperta; identical to SEQ ID NO: 638

SEQ ID NO: 1124 - protein, 37 aa, Agelenopsis aperta; identical to SEQ ID NO: 639

SEQ ID NO: 1125 - protein, 37 aa, Agelenopsis aperta; identical to SEQ ID NO: 640

SEQ ID NO: 1126 - protein, 37 aa, Hololena curta; identical to SEQ ID NO: 641

SEQ ID NO: 1127 - protein, 36 aa, Hololena curta; identical to SEQ ID NO: 642

SEQ ID NO: 1128 - protein, 38 aa, Hololena curta; identical to SEQ ID NO: 638

SEQ ID NO: 1129 - protein, 38 aa, Hololena curta; identical to SEQ ID NO: 643

SEQ ID NO: 1130 - protein, 94 aa, Diguetia canities
MKVFVVLLCLSLAAVYALEERLDKDADIMLDSPADMERAKDGDVEGPAGCKKYDVECDSGECCQKQYLWYKWRPLDCRCLKSGFFSSKCVCRDV

SEQ ID NO: 1131 - protein, 58 aa, Diguetia canities
AKDGDVKGPAGCMKYKSGDCRGKTCCDQQYLWYKWRNLACRCFTVEVFKKDCWCNDIS

SEQ ID NO: 1132 - protein, 121 aa, Macrothele gigas; identical to SEQ ID NO: 839

SEQ ID NO: 1133 - protein, 38 aa, Macrothele gigas; identical to SEQ ID NO: 838

SEQ ID NO: 1134 - protein, 99 aa, Macrothele gigas; identical to SEQ ID NO: 854

SEQ ID NO: 1135 - protein, 46 aa, Macrothele gigas
GGCIKWNHSCQTTTLKCCGKCVVCYCHTPWGTNCRCDRTRLFCTED

SEQ ID NO: 1136 - protein, 87 aa, Haplopelma huwenum; identical to SEQ ID NO: 819

SEQ ID NO: 1137 - protein, 39 aa, Missulena bradleyi; identical to SEQ ID NO: 762

SEQ ID NO: 1138 - protein, 48 aa, Agelenopsis aperta
KKKCIAKDYGRCKWGGTPCCRGRGCICSIMGTNCECKPRLIMEGLGLA

SEQ ID NO: 1139 - protein, 83 aa, Agelenopsis aperta
MKLCMTLLITAIAVVTFVVATQEESAEFNEVEESREDNCIAEDYGKCTWGGTKCCRGRPCRCSMIGTNCECTPRLIMEGLSFA

SEQ ID NO: 1140 - protein, 83 aa, Agelenopsis aperta; identical to SEQ ID NO: 1139

SEQ ID NO: 1141 - protein, 85 aa, Atrax robustus; identical to SEQ ID NO: 724

SEQ ID NO: 1142 - protein, 37 aa, Atrax robustus; identical to SEQ ID NO: 627

SEQ ID NO: 1143 - protein, 73 aa, Atrax robustus; identical to SEQ ID NO: 602

SEQ ID NO: 1144 - protein, 78 aa, Atrax robustus; identical to SEQ ID NO: 592

SEQ ID NO: 1145 - protein, 78 aa, Atrax robustus; identical to SEQ ID NO: 594

SEQ ID NO: 1146 - protein, 78 aa, Atrax robustus; identical to SEQ ID NO: 600

SEQ ID NO: 1147 - protein, 78 aa, Atrax robustus; identical to SEQ ID NO: 596

SEQ ID NO: 1148 - protein, 76 aa, Atrax robustus; identical to SEQ ID NO: 582

SEQ ID NO: 1149 - protein, 78 aa, Atrax robustus; identical to SEQ ID NO: 598

SEQ ID NO: 1150 - protein, 98 aa, Atrax robustus; identical to SEQ ID NO: 535

SEQ ID NO: 1151 - protein, 98 aa, Atrax robustus; identical to SEQ ID NO: 542

SEQ ID NO: 1152 - protein, 96 aa, Atrax robustus; identical to SEQ ID NO: 550

SEQ ID NO: 1153 - protein, 96 aa, Atrax robustus; identical to SEQ ID NO: 551

SEQ ID NO: 1154 - protein, 97 aa, Atrax robustus; identical to SEQ ID NO: 560

SEQ ID NO: 1155 - protein, 97 aa, Atrax robustus; identical to SEQ ID NO: 561

SEQ ID NO: 1156 - protein, 100 aa, Atrax sp. Illawarra
MKFSKLSITLAVILTQAVFVLCGMKNEDFMEKGLESNELHDAIKKPVNSGKPDTERLLDCVLSRVCSPDANCCGLTPICKMGLCVPKVGGLLGGLLGGIL

SEQ ID NO: 1157 - protein, 100 aa, Atrax sp. Illawarra
MKFSKLSITLAVILTQAVFVLCGMKNEDFMEKGLESNELHDAIKKPVNSGKPDTERLLDCVLSRVCSSDANCCGLTPTCKMGLCVPKVGGLLGGLLGGIL

SEQ ID NO: 1158 - protein, 37 aa, Hadronyche formidabilis; identical to SEQ ID NO: 631

SEQ ID NO: 1159 - protein, 36 aa, Hadronyche infensa; identical to SEQ ID NO: 615

SEQ ID NO: 1160 - protein, 78 aa, Hadronyche infensa; identical to SEQ ID NO: 620

SEQ ID NO: 1161 - protein, 78 aa, Hadronyche infensa; identical to SEQ ID NO: 614

SEQ ID NO: 1162 - protein, 37 aa, Hadronyche infensa; identical to SEQ ID NO: 609

SEQ ID NO: 1163 - protein, 79 aa, Hadronyche infensa; identical to SEQ ID NO: 918

SEQ ID NO: 1164 - protein, 79 aa, Hadronyche infensa; identical to SEQ ID NO: 608

SEQ ID NO: 1165 - protein, 79 aa, Hadronyche infensa; identical to SEQ ID NO: 610

SEQ ID NO: 1166 - protein, 79 aa, Hadronyche infensa; identical to SEQ ID NO: 917

SEQ ID NO: 1167 - protein, 37 aa, Hadronyche infensa; identical to SEQ ID NO: 613

SEQ ID NO: 1168 - protein, 78 aa, Hadronyche infensa; identical to SEQ ID NO: 612

SEQ ID NO: 1169 - protein, 37 aa, Hadronyche versuta
SPTCIPSGGPCPYNENCCSQSCTFKENENGNTVKRCD

SEQ ID NO: 1170 - protein, 37 aa, Hadronyche versuta; identical to SEQ ID NO: 767

SEQ ID NO: 1171 - protein, 37 aa, Hadronyche versuta; identical to SEQ ID NO: 769

SEQ ID NO: 1172 - protein, 37 aa, Hadronyche versuta; identical to SEQ ID NO: 601

SEQ ID NO: 1173 - protein, 37 aa, Hadronyche versuta; identical to SEQ ID NO: 771

SEQ ID NO: 1174 - protein, 37 aa, Hadronyche versuta; identical to SEQ ID NO: 772

SEQ ID NO: 1175 - protein, 76 aa, Hadronyche versuta; identical to SEQ ID NO: 582

SEQ ID NO: 1176 - protein, 76 aa, Hadronyche versuta; identical to SEQ ID NO: 580

SEQ ID NO: 1177 - protein, 76 aa, Hadronyche versuta; identical to SEQ ID NO: 584

SEQ ID NO: 1178 - protein, 45 aa, Hadronyche versuta; identical to SEQ ID NO: 589

SEQ ID NO: 1179 - protein, 98 aa, Hadronyche versuta; identical to SEQ ID NO: 959

SEQ ID NO: 1180 - protein, 98 aa, Hadronyche versuta; identical to SEQ ID NO: 537

SEQ ID NO: 1181 - protein, 98 aa, Hadronyche versuta; identical to SEQ ID NO: 538

SEQ ID NO: 1182 - protein, 98 aa, Hadronyche versuta; identical to SEQ ID NO: 539

SEQ ID NO: 1183 - protein, 98 aa, Hadronyche versuta; identical to SEQ ID NO: 540

SEQ ID NO: 1184 - protein, 93 aa, Hadronyche versuta; identical to SEQ ID NO: 541

SEQ ID NO: 1185 - protein, 98 aa, Hadronyche versuta; identical to SEQ ID NO: 543

SEQ ID NO: 1186 - protein, 98 aa, Hadronyche versuta; identical to SEQ ID NO: 544

SEQ ID NO: 1187 - protein, 98 aa, Hadronyche versuta; identical to SEQ ID NO: 548

SEQ ID NO: 1188 - protein, 93 aa, Hadronyche versuta; identical to SEQ ID NO: 546

SEQ ID NO: 1189 - protein, 97 aa, Hadronyche versuta; identical to SEQ ID NO: 545

SEQ ID NO: 1190 - protein, 98 aa, Hadronyche versuta; identical to SEQ ID NO: 549

SEQ ID NO: 1191 - protein, 98 aa, Hadronyche versuta; identical to SEQ ID NO: 547

SEQ ID NO: 1192 - protein, 101 aa, Hadronyche versuta; identical to SEQ ID NO: 552

SEQ ID NO: 1193 - protein, 101 aa, Hadronyche versuta; identical to SEQ ID NO: 553

SEQ ID NO: 1194 - protein, 101 aa, Hadronyche versuta; identical to SEQ ID NO: 557

SEQ ID NO: 1195 - protein, 101 aa, Hadronyche versuta; identical to SEQ ID NO: 554

SEQ ID NO: 1196 - protein, 101 aa, Hadronyche versuta; identical to SEQ ID NO: 558

SEQ ID NO: 1197 - protein, 95 aa, Hadronyche versuta; identical to SEQ ID NO: 568

SEQ ID NO: 1198 - protein, 100 aa, Hadronyche versuta; identical to SEQ ID NO: 559

SEQ ID NO: 1199 - protein, 101 aa, Hadronyche versuta; identical to SEQ ID NO: 562

SEQ ID NO: 1200 - protein, 101 aa, Hadronyche versuta; identical to SEQ ID NO: 563

SEQ ID NO: 1201 - protein, 101 aa, Hadronyche versuta; identical to SEQ ID NO: 566

SEQ ID NO: 1202 - protein, 101 aa, Hadronyche versuta; identical to SEQ ID NO: 567

SEQ ID NO: 1203 - protein, 101 aa, Hadronyche versuta; identical to SEQ ID NO: 564

SEQ ID NO: 1204 - protein, 101 aa, Hadronyche versuta; identical to SEQ ID NO: 565

SEQ ID NO: 1205 - protein, 83 aa, Hadronyche venenata; identical to SEQ ID NO: 878

SEQ ID NO: 1206 - protein, 84 aa, Hadronyche venenata; identical to SEQ ID NO: 879

SEQ ID NO: 1207 - protein, 84 aa, Hadronyche venenata; identical to SEQ ID NO: 880

SEQ ID NO: 1208 - protein, 84 aa, Hadronyche venenata; identical to SEQ ID NO: 881

SEQ ID NO: 1209 - protein, 84 aa, Hadronyche venenata; identical to SEQ ID NO: 882

SEQ ID NO: 1210 - protein, 84 aa, Hadronyche venenata; identical to SEQ ID NO: 883

SEQ ID NO: 1211 - protein, 100 aa, Illawara wisharti; identical to SEQ ID NO: 1156

SEQ ID NO: 1212 - protein, 55 aa, Oxyopes lineatus
AWKCLPKDSTCGDDCDCCEGLHCHCPLRNMLPAILRCSCQSKDDHINTCPKYKKS

SEQ ID NO: 1213 - protein, 44 aa, Plectreurys tristis
ADCSATGDTCDHTKKCCDDCYTCRCGTPWGANCRCDYYKARCDT

SEQ ID NO: 1214 - protein, 39 aa, Aphonopelma sp.; identical to SEQ ID NO: 957

SEQ ID NO: 1215 - protein, 39 aa, Aphonopelma sp.; identical to SEQ ID NO: 777

SEQ ID NO: 1216 - protein, 39 aa, Aphonopelma sp.; identical to SEQ ID NO: 792

SEQ ID NO: 1217 - protein, 39 aa, Brachypelma albiceps; identical to SEQ ID NO: 844

SEQ ID NO: 1218 - protein, 39 aa, Brachypelma albiceps; identical to SEQ ID NO: 848

SEQ ID NO: 1219 - protein, 39 aa, Brachypelma smithi; identical to SEQ ID NO: 792

SEQ ID NO: 1220 - protein, 99 aa, Brachypelma smithi; identical to SEQ ID NO: 868

SEQ ID NO: 1221 - protein, 86 aa, Haplopelma huwenum; identical to SEQ ID NO: 821

SEQ ID NO: 1222 - protein, 47 aa, Anemonia erythraea
GAPCLCANSGPNTRGNDLNGIVWVFGCPSGWHDCHGRAMVGYCCQED

SEQ ID NO: 1223 - protein, 42 aa, Anthopleura elegantissima
GTTCYCGKTIGIYWFGTKTCPSNRGYTGSCGYFLGICCYPVD

SEQ ID NO: 1224 - protein, 42 aa, Anthopleura elegantissima
GTACSCGNSKGIYWFYRPSCPTDRGYTGSCRYFLGTCCTPAD

SEQ ID NO: 1225 - protein, 43 aa, Anemonia sulcata
AAPCFCSGKPGRGDLWILRGTCPGGYGYTSNCYKWPNICCYPH

SEQ ID NO: 1226 - protein, 43 aa, Anemonia sulcata
AAPCFCPGKPDRGDLWILRGTCPGGYGYTSNCYKWPNICCYPH

SEQ ID NO: 1227 - protein, 48 aa, Bunodosoma granulifera
GASCRCDSDGPTSRGNTLTGTLWLIGRCPSGWHNCRGSGPFIGYCCKQ

SEQ ID NO: 1228 - protein, 48 aa, Bunodosoma granulifera
GASCRCDSDGPTSRGDTLTGTLWLIGRCPSGWHNCRGSGPFIGYCCKQ

SEQ ID NO: 1229 - protein, 47 aa, Anthopleura elegantissima
GIACLCDSDGPSVRGNTLSGTYWLAGCPSGWHNCKSSGQLIGACCKQ

SEQ ID NO: 1230 - protein, 47 aa, Anthopleura elegantissima
GVPCLCDSDGPNVRGNTLSGTYWLAGCPSGWHNCKSSGPLIGACCKQ

SEQ ID NO: 1231 - protein, 47 aa, Anemonia sulcata
GVACLCDSDGPNVRGNTLSGTIWLAGCPSGWHNCKAHGPTIGWCCKQ

SEQ ID NO: 1232 - protein, 47 aa, Anthopleura fuscoviridis; identical to SEQ ID NO: 1231

SEQ ID NO: 1233 - protein, 48 aa, HETERACTIS CRISPA
ASCKCDDDGPDVRSATFTGTVDFAYCNAGWEKCLAVYTPVASCCRKKK

SEQ ID NO: 1234 - protein, 48 aa, Stoichactis helianthus
AACKCDDEGPDIRTAPLTGTVDLGSCNAGWEKCASYYTIIADCCRKKK

SEQ ID NO: 1235 - protein, 47 aa, Anthopleura elegantissima
GVPCLCDSDGPSVRGNTLSGILWLAGCPSGWHNCKAHGPTIGWCCKQ

SEQ ID NO: 1236 - protein, 47 aa, Anthopleura elegantissima
GVPCLCDSDGPNVRGNTLSGILWLAGCPSGWHNCKAHGPTIGWCCKQ

SEQ ID NO: 1237 - protein, 47 aa, Anemonia sulcata
GVPCLCDSDGPSVRGNTLSGIIWLAGCPSGWHNCKKHGPTIGWCCKQ

SEQ ID NO: 1238 - protein, 48 aa, Anthopleura fuscoviridis
GGVPCLCDSDGPSVRGNTLSGIIWLAGCPSGWHNCKAHGPTIGWCCKQ

SEQ ID NO: 1239 - protein, 48 aa, Heteractis crispa
GTCKCDDDGPDVRTATFTGSTEFANCNESWEKCLAVYTPVASCCRKKK

SEQ ID NO: 1240 - protein, 48 aa, Radianthus paumotensis
ASCKCDDDGPDVRSATFTGTVDFWNCNEGWEKCTAVYTPVASCCRKKK

SEQ ID NO: 1241 - protein, 31 aa, Parasicyonis actinostoloides
AGGKSTCCPCAMCKYTAGCPWGQCAHHCGCS

SEQ ID NO: 1242 - protein, 48 aa, Heteractis crispa
GNCKCDDEGPYVRTAPLTGYVDLGYCNEGWEKCASYYSPIAECCRKKK

SEQ ID NO: 1243 - protein, 48 aa, Radianthus paumotensis
GNCKCDDEGPNVRTAPLTGYVDLGYCNEGWEKCASYYSPIAECCRKKK

SEQ ID NO: 1244 - protein, 48 aa, Heteractis crispa
GNCKCDDEGPNVRTAPLTGYVDLGYCNEGWDKCASYYSPIAECCRKKK

SEQ ID NO: 1245 - protein, 46 aa, Anemonia sulcata
GVPCLCDSDGPSVRGNTLSGILWLAGCPSGWHNCKKHKPTIGWCCK

SEQ ID NO: 1246 - protein, 47 aa, Heteractis crispa
GNCKCDDEGPNVRTAPLTGYVDLGYCNEGWEKCASYYSPIAECCRKK

SEQ ID NO: 1247 - protein, 49 aa, Anthopleura xanthogrammica
GVSCLCDSDGPSVRGNTLSGTLWLYPSGCPSGWHNCKAHGPTIGWCCKQ

SEQ ID NO: 1248 - protein, 49 aa, Anthopleura xanthogrammica
GVPCLCDSDGPRPRGNTLSGILWFYPSGCPSGWHNCKAHGPNIGWCCKK

SEQ ID NO: 1249 - protein, 47 aa, Anthopleura elegantissima; identical to SEQ ID NO: 1235

SEQ ID NO: 1250 - protein, 36 aa, Actinia equina
GCKDNFSANTCKHVKANNNCGSQKYATNCAKTCGKC

SEQ ID NO: 1251 - protein, 37 aa, Bunodosoma granulifera
VCRDWFKETACRHAKSLGNCRTSQKYRANCAKTCELC

SEQ ID NO: 1252 - protein, 48 aa, Bunodosoma caissarum
GVACRCDSDGPTSRGNTLTGTLWLTGGCPSGWHNCRGSGPFIGYCCKK

SEQ ID NO: 1253 - protein, 41 aa, Bunodosoma caissarum
GLPCDCHGHTGTYWLNYYSKCPKGYGYTGRCRYLVGSCCYK

SEQ ID NO: 1254 - protein, 48 aa, Bunodosoma cangicum
GVACRCDSDGPTVRGNSLSGTLWLTGGCPSGWHNCRGSGPFIGYCCKK

SEQ ID NO: 1255 - protein, 35 aa, Stoichactis helianthus
RSCIDTIPKSRCTAFQCKHSMKYRLSFCRKTCGTC

SEQ ID NO: 1256 - protein, 47 aa, Anthopleura xanthogrammica
GVPCLCDSDGPNVRGNTLSGTYWLAGCPSGWHNCKSSGPNIGWCCKK

SEQ ID NO: 1257 - protein, 47 aa, Anthopleura xanthogrammica
GVACLCDADGPSVSGNTLSGILWLAGCPSGWHNCKAHGPTIGWCCKK

SEQ ID NO: 1258 - protein, 47 aa, Anthopleura xanthogrammica
GAACFCDSDGPSVSGNTLSGILWLAGCPSGWHNCKAHGPNIGWCCKK

SEQ ID NO: 1259 - protein, 47 aa, Anthopleura xanthogrammica
GVPCLCDSDGPSVRGNSLSGIIWLFGCPSGWHNCRDHGPTIGWCCKK

SEQ ID NO: 1260 - protein, 49 aa, Anthopleura xanthogrammica
GVSCLCDSDGPSVRGNTLSGILWFYPSGCPSGWHNCKAHGPTIGWCCKQ

SEQ ID NO: 1261 - protein, 48 aa, Bunodosoma cangicum
GVACRCDSDGPTVRGDSLSGTLWLTGGCPSGWHNCRGSGPFIGYCCKK

SEQ ID NO: 1262 - protein, 48 aa, Bunodosoma cangicum
GVACRCDSDGPTVHGDSLSGTLWLTGGCPSGWHNCRGSGPFIGYCCKK

SEQ ID NO: 1263 - protein, 33 aa, Pandinus imperator
GDCLPHLKRCKADNDCCGKKCKRRGTNAEKRCR

SEQ ID NO: 1264 - protein, 32 aa, Centruroides noxius
VACVYRTCDKDCTSRKYRSGKCINNACKCYPY

SEQ ID NO: 1265 - protein, 37 aa, Parabuthus villosus
DEEPKESCSDEMCVIYCKGEEYSTGVCDGPQKCKCSD

SEQ ID NO: 1266 - protein, 37 aa, Parabuthus villosus
DEEPKETCSDEMCVIYCKGEEYSTGVCDGPQKCKCSD

SEQ ID NO: 1267 - protein, 36 aa, Parabuthus granulatus
DEEPKETCSDDMCVIYCKGEEFSTGACDGPQKCKCS

SEQ ID NO: 1268 - protein, 40 aa, Tityus serrulatus
WCSTCLDLACGASRECYDPCFKAFGRAHGKCMNNKCRCYT

SEQ ID NO: 1269 - protein, 40 aa, Tityus trivittatus; identical to SEQ ID NO: 1268

SEQ ID NO: 1270 - protein, 40 aa, Tityus costatus
WCSTCLDLECGASRECYDPCFKAFGRAHGKCMNNKCRCYT

SEQ ID NO: 1271 - protein, 37 aa, Androctonus australis
QNETNKKCQGGSCASVCRRVIGVAAGKCINGRCVCYP

SEQ ID NO: 1272 - protein, 37 aa, Androctonus mauretanicus mauretanicus
QIETNKKCQGGSCASVCRKVIGVAAGKCINGRCVCYP

SEQ ID NO: 1273 - protein, 38 aa, Tityus discrepans
QIDTNVKCSGSSKCVKICIDRYNTRGAKCINGRCTCYP

SEQ ID NO: 1274 - protein, 36 aa, Mesobuthus tamulus
DLIDVKCISSQECWIACKKVTGRFEGKCQNRQCRCY

SEQ ID NO: 1275 - protein, 31 aa, Mesobuthus martensii
AACYSSDCRVKCVAMGFSSGKCINSKCKCYK

SEQ ID NO: 1276 - protein, 37 aa, Mesobuthus tamulus
QFTDVDCSVSKECWSVCKDLFGVDRGKCMGKKCRCYQ

SEQ ID NO: 1277 - protein, 37 aa, Centruroides limbatus
  MISC_FEATURE (37)..(37): Xaa is Ala, Arg, Asn, Asp, Asx, Cys, Glu, Gln, Glx, Gly, His, Ile, Leu, Lys, Met, Phe, Pro, Ser, Thr, Trp, Tyr, or Val.
VFIDVSCSVSKECWAPCKAAVGTDRGKCMGKKCRCYX

SEQ ID NO: 1278 - protein, 36 aa, Leiurus quinquestriatus hebraeus
GLIDVRCYDSRQCWIACKKVTGSTQGKCQNKQCRCY

SEQ ID NO: 1279 - protein, 36 aa, Centruroides limbatus
HFIDVKCTTSKECWPPCKAATGKAAGKCMNKKCKCQ

SEQ ID NO: 1280 - protein, 37 aa, Parabuthus transvaalicus
EVDMRCKSSKECLVKCKQATGRPNGKCMNRKCKCYPR

SEQ ID NO: 1281 - protein, 37 aa, Centruroides noxius
TFIDVDCTVSKECWAPCKAAFGVDRGKCMGKKCKCYV

SEQ ID NO: 1282 - protein, 37 aa, Leiurus quinquestriatus hebraeus
QFTNVSCTTSKECWSVCEKLYNTSRGKCMNKKCRCYS

SEQ ID NO: 1283 - protein, 39 aa, Centruroides noxius
TIINVKCTSPKQCSKPCKELYGSSAGAKCMNGKCKCYNN

SEQ ID NO: 1284 - protein, 39 aa, Centruroides margaritatus
TIINVKCTSPKQCLPPCKAQFGQSAGAKCMNGKCKCYPH

SEQ ID NO: 1285 - protein, 38 aa, Centruroides limpidus limpidus
ITINVKCTSPQQCLRPCKDRFGQHAGGKCINGKCKCYP

SEQ ID NO: 1286 - protein, 38 aa, Centruroides noxius
TIINEKCFATSQCWTPCKKAIGSLQSKCMNGKCKCYNG

SEQ ID NO: 1287 - protein, 39 aa, Centruroides limbatus
TVIDVKCTSPKQCLPPCKAQFGIRAGAKCMNGKCKCYPH

SEQ ID NO: 1288 - protein, 34 aa, Centruroides limbatus
  MISC_FEATURE (23)..(23): Xaa is Ala, Arg, Asn, Asp, Asx, Cys, Glu, Gln, Glx, Gly, His, Ile, Leu, Lys, Met, Phe, Pro, Ser, Thr, Trp, Tyr, or Val.
TFINVKCTSPKQCLPACKEKFGXAAGKCMNGKCK

SEQ ID NO: 1289 - protein, 36 aa, Centruroides limpidus limpidus
TVIDVKCTSPKQCLPPCKEIYGRHAGAKCMNGKCKC

SEQ ID NO: 1290 - protein, 39 aa, Centruroides elegans
TVINVKCTSPKQCLKPCKDLYGPHAGAKCMNGKCKCYNN

SEQ ID NO: 1291 - protein, 39 aa, Centruroides elegans
TIINVKCTSPKQCLKPCKDLYGPHAGAKCMNGKCKCYNN

SEQ ID NO: 1292 - protein, 39 aa, Centruroides elegans
TIINVKCTSPKQCLLPCKEIYGIHAGAKCMNGKCKCYKI

SEQ ID NO: 1293 - protein, 39 aa, Centruroides elegans
TIINVKCTSPKQCLPPCKEIYGRHAGAKCMNGKCHCSKI

SEQ ID NO: 1294 - protein, 39 aa, Centruroides elegans; identical to SEQ ID NO: 1293

SEQ ID NO: 1295 - protein, 38 aa, Androctonus mauretanicus mauretanicus
GVEINVKCSGSPQCLKPCKDAGMRFGKCMNRKCHCTPK

SEQ ID NO: 1296 - protein, 38 aa, Leiurus quinquestriatus hebraeus
GVPINVSCTGSPQCIKPCKDAGMRFGKCMNRKCHCTPK

SEQ ID NO: 1297 - protein, 38 aa, Leiurus quinquestriatus hebraeus
GVPINVPCTGSPQCIKPCKDAGMRFGKCMNRKCHCTPK

SEQ ID NO: 1298 - protein, 38 aa, Leiurus quinquestriatus hebraeus
GVPINVKCTGSPQCLKPCKDAGMRFGKCINGKCHCTPK

SEQ ID NO: 1299 - protein, 38 aa, Orthochirus scrobiculosus
GVIINVKCKISRQCLEPCKKAGMRFGKCMNGKCHCTPK

SEQ ID NO: 1300 - protein, 38 aa, Buthus sindicus
GVPINVKCRGSPQCIQPCRDAGMRFGKCMNGKCHCTPQ

SEQ ID NO: 1301 - protein, 37 aa, Buthus occitanus tunetanus
VGIPVSCKHSGQCIKPCKDAGMRFGKCMNRKCDCTPK

SEQ ID NO: 1302 - protein, 37 aa, Tityus serrulatus
VFINAKCRGSPECLPKCKEAIGKAAGKCMNGKCKCYP

SEQ ID NO: 1303 - protein, 37 aa, Tityus discrepans
VFINVKCTGSKQCLPACKAAVGKAAGKCMNGKCKCYT

SEQ ID NO: 1304 - protein, 37 aa, Tityus cambridgei
VFINVKCRGSKECLPACKAAVGKAAGKCMNGKCKCYP

SEQ ID NO: 1305 - protein, 31 aa, Leiurus quinquestriatus hebraeus
AFCNLRMCQLSCRSLGLLGKCIGDKCECVKH

SEQ ID NO: 1306 - protein, 31 aa, Androctonus mauretanicus mauretanicus
TVCNLRRCQLSCRSLGLLGKCIGVKCECVKH

SEQ ID NO: 1307 - protein, 31 aa, Mesobuthus tamulus
AFCNLRRCELSCRSLGLLGKCIGEECKCVPY

SEQ ID NO: 1308 - protein, 31 aa, Mesobuthus tamulus
AFCNLRRCELSCRSLGLLGKCIGEECKCVPH

SEQ ID NO: 1309 - protein, 35 aa, Pandinus imperator
LVKCRGTSDCGRPCQQQTGCPNSKCINRMCKCYGC

SEQ ID NO: 1310 - protein, 34 aa, Scorpio maurus palmatus
VSCTGSKDCYAPCRKQTGCPNAKCINKSCKCYGC

SEQ ID NO: 1311 - protein, 34 aa, Heterometrus spinifer
ASCRTPKDCADPCRKETGCPYGKCMNRKCKCNRC

SEQ ID NO: 1312 - protein, 35 aa, Anuroctonus phaiodactylus
QKECTGPQHCTNFCRKNKCTHGKCMNRKCKCFNCK

SEQ ID NO: 1313 - protein, 34 aa, Heterometrus spinifer
IRCSGSRDCYSPCMKQTGCPNAKCINKSCKCYGC

SEQ ID NO: 1314 - protein, 36 aa, Hadrurus gertschi
TGTSCISPKQCTEPCRAKGCKHGKCMNRKCHCMLCL

SEQ ID NO: 1315 - protein, 35 aa, Pandinus imperator
TISCTNEKQCYPHCKKETGYPNAKCMNRKCKCFGR

SEQ ID NO: 1316 - protein, 42 aa, Centruroides elegans
DRDSCVDKSRCAKYGYYQECTDCCKKYGHNGGTCMFFKCKCA

SEQ ID NO: 1317 - protein, 42 aa, Centruroides gracilis
DRDSCVDKSRCAKYGHYQECTDCCKKYGHNGGTCMFFKCKCA

SEQ ID NO: 1318 - protein, 42 aa, Centruroides sculpturatus
DRDSCVDKSRCAKYGYYQECQDCCKKAGHNGGTCMFFKCKCA

SEQ ID NO: 1319 - protein, 42 aa, Centruroides limpidus limpidus
DRDSCVDKSRCSKYGYYQECQDCCKKAGHNGGTCMFFKCKCA

SEQ ID NO: 1320 - protein, 42 aa, Centruroides exilicauda
DRDSCVDKSRCAKYGYYQECQDCCKKAGHSGGTCMFFKCKCA

SEQ ID NO: 1321 - protein, 43 aa, Centruroides noxius
DRDSCVDKSKCGKYGYYQECQDCCKNAGHNGGTCVYYKCKCNP

SEQ ID NO: 1322 - protein, 36 aa, Buthus eupeus
MCMPCFTTRPDMAQQCRACCKGRGKCFGPQCLCGYD

SEQ ID NO: 1323 - protein, 35 aa, Buthus sindicus
RCKPCFTTDPQMSKKCADCCGGKGKGKCYGPQCLC

SEQ ID NO: 1324 - protein, 36 aa, Buthus eupeus
MCMPCFTTDHQTARRCRDCCGGRGRKCFGQCLCGYD

SEQ ID NO: 1325 - protein, 35 aa, Buthus eupeus
MCMPCFTTDHNMAKKCRDCCGGNGKCFGPQCLCNR

SEQ ID NO: 1326 - protein, 35 aa, Buthus eupeus
MCMPCFTTDPNMAKKCRDCCGGNGKCFGPQCLCNR

SEQ ID NO: 1327 - protein, 36 aa, Buthus occitanus tunetanus
  MISC_FEATURE (32)..(32): Xaa is Ala, Arg, Asn, Asp, Asx, Cys, Glu, Gln, Glx, Gly, His, Ile, Leu, Lys, Met, Phe, Pro, Ser, Thr, Trp, Tyr, or Val.
  MISC_FEATURE (33)..(33): Xaa is Ala, Arg, Asn, Asp, Asx, Cys, Glu, Gln, Glx, Gly, His, Ile, Leu, Lys, Met, Phe, Pro, Ser, Thr, Trp, Tyr, or Val.
VRDAYIAQNYNCVYTCFKNDYCNDICTKNGAXXGYC

SEQ ID NO: 1328 - protein, 38 aa, Leiurus quinquestriatus hebraeus
RCSPCFTTDQQMTKKCYDCCGGKGKGKCYGPQCICAPY

SEQ ID NO: 1329 - protein, 33 aa, Buthus occitanus tunetanus
AEIKVRDGYIVYPNNCVYHCGLDPYCNDLCTGA

SEQ ID NO: 1330 - protein, 33 aa, Scorpio maurus palmatus; identical to SEQ ID NO: 722

SEQ ID NO: 1331 - protein, 36 aa, Buthus sindicus
CGPCFTKDPETEKKCATCCGGIGRCFGPQCLCNRGY

SEQ ID NO: 1332 - protein, 36 aa, Leiurus quinquestriatus quinquestriatus
MCMPCFTTDHQMARKCDDCCGGKGRGKCYGPQCLCR

SEQ ID NO: 1333 - protein, 35 aa, Androctonus mauretanicus mauretanicus
CGPCFTTDPYTESKCATCCGGRGKCVGPQCLCNRI

SEQ ID NO: 1334 - protein, 35 aa, Buthus eupeus
MCMPCFTTDPNMANKCRDCCGGGKKCFGPQCLCNR

SEQ ID NO: 1335 - protein, 35 aa, Hemiscorpius lepturus
IKCTLSKDCYSPCKKETGCPRAKCINRNCKCYGCS

SEQ ID NO: 1336 - protein, 34 aa, Leiurus quinquestriatus hebraeus
CGPCFTTDHQMEQKCAECCGGIGKCYGPQCLCNR

SEQ ID NO: 1337 - protein, 70 aa, Androctonus australis; identical to SEQ ID NO: 645

SEQ ID NO: 1338 - protein, 72 aa, Anuroctonus phaiodactylus
KFIRHKDESFYECGQLIGYQQYCVNACQAHGSKEKGYCKGMAPFGLPGGCYCPKLPSNRVKMCFGALESKCA

SEQ ID NO: 1339 - protein, 61 aa, Buthacus arenicola; identical to SEQ ID NO: 699

SEQ ID NO: 1340 - protein, 65 aa, Bothus occitanus tunetanus; identical to SEQ ID NO: 676

SEQ ID NO: 1341 - protein, 60 aa, Bothus occitanus tunetanus; identical to SEQ ID NO: 701

SEQ ID NO: 1342 - protein, 64 aa, Buthus martensii; identical to SEQ ID NO: 681

SEQ ID NO: 1343 - protein, 64 aa, Buthus martensii; identical to SEQ ID NO: 682

SEQ ID NO: 1344 - protein, 64 aa, Buthus martensii; identical to SEQ ID NO: 683

SEQ ID NO: 1345 - protein, 66 aa, Buthus martensii; identical to SEQ ID NO: 684

SEQ ID NO: 1346 - protein, 72 aa, Buthus martensii
KKNGYAVDSSGKVAECLFNNYCNNECTKVYYADKGYCCLLKCYCFGLADDKPVLDIWDSTKNYCDVQIIDLS

SEQ ID NO: 1347 - protein, 66 aa, buthus occitanus mardochei; identical to SEQ ID NO: 679

SEQ ID NO: 1348 - protein, 65 aa, buthus occitanus mardochei; identical to SEQ ID NO: 680

SEQ ID NO: 1349 - protein, 64 aa, Hottentotta judaica; identical to SEQ ID NO: 677

SEQ ID NO: 1350 - protein, 76 aa, Hottentotta judaicus
KKNGYPLDRNGKTTECSGVNAIAPHYCNSECTKVYYAESGYCCWGACYCFGLEDDKPIGPMKDITKKYCDVQIIPS

SEQ ID NO: 1351 - protein, 61 aa, Hottentotta judaicus; identical to SEQ ID NO: 649

SEQ ID NO: 1352 - protein, 64 aa, Leiurus quinquestriatus hebraeus; identical to SEQ ID NO: 674

SEQ ID NO: 1353 - protein, 63 aa, Leiurus quinquestriatus hebraeus; identical to SEQ ID NO: 702

SEQ ID NO: 1354 - protein, 61 aa, Leiurus quinquestriatus hebraeus; identical to SEQ ID NO: 696

SEQ ID NO: 1355 - protein, 60 aa, Leiurus quinquestriatus hebraeus; identical to SEQ ID NO: 697

SEQ ID NO: 1356 - protein, 70 aa, Leiurus quinquestriatus hebraeus; identical to SEQ ID NO: 694

SEQ ID NO: 1357 - protein, 67 aa, Leiurus quinquestriatus hebraeus; identical to SEQ ID NO: 678

SEQ ID NO: 1358 - protein, 64 aa, Leiurus quinquestriatus hebraeus; identical to SEQ ID NO: 685

SEQ ID NO: 1359 - protein, 66 aa, Leiurus quinquestriatus hebraeus; identical to SEQ ID NO: 686

SEQ ID NO: 1360 - protein, 70 aa, Leiurus quinquestriatus quinquestriatus; identical to SEQ ID NO: 693

SEQ ID NO: 1361 - protein, 61 aa, Leiurus quinquestriatus quinquestriatus; identical to SEQ ID NO: 648

SEQ ID NO: 1362 - protein, 64 aa, Leiurus quinquestriatus quinquestriatus; identical to SEQ ID NO: 675

SEQ ID NO: 1363 - protein, 65 aa, Odonthobuthus doriae
GVRDAYIADDKNCVYTCASNGYCNTECTKNGAESGYCQWIGRYGNACWCIKLPDEVPIRIPGKCR

SEQ ID NO: 1364 - protein, 61 aa, Tityus serrulatus
KEGYLMDHEGCKLSCFIRPSGYCGRECGIKKGSSGYCAWPACYCYGLPNWVKVWDRATNKC

SEQ ID NO: 1365 - protein, 64 aa, Tityus zulianus; identical to SEQ ID NO: 704

SEQ ID NO: 1366 - protein, 681 aa, Bacillus thuringiensis
MGGIDMNPYQNKNEYEIFNAPSNGFSKSNNYSRYPLANKPNQPLKNTNYKDWLNVCQDNQQYGNNAGNFASSETIVGVSAGIIVVGTMLGAFAAPVLAAGIISFGTLLPIFWQGSDPANVWQDLLNIGGRPIQEIDKNIINVLTSIVTPIKNQLDKYQEFFDKWEPARTHANAKAVHDLFTTLEPIIDKDLDMLKNNASYRIPTLPAYAQIATWHLNLLKHAATYYNIWLQNQGINPSTFNSSNYYQGYLKRKIQEYTDYCIQTYNAGLTMIRTNTNATWNMYNTYRLEMTLTVLDLIAIFPNYDPEKYPIGVKSELIREVYTNVNSDTFRTITELENGLTRNPTLFTWINQGRFYTRNSRDILDPYDIFSFTGNQMAFTHTNDDRNIIWRAVHGNIISQDTSKVFPFYRNKPIDKVEIVRHREYSDIIYEMIFFSNSSEVFRYSSNSTIENNYKRTDSYMIPKQTWKNEEYGHTLSYIKTDNYIFSVVRERRRVAFSWTHTSVDFQNTIDLDNITQIHALKTLKVSSNSKIVKGLGHTSENLVILKDSMNFRVRFLKNVSQQYQVRIRYATNAPKTTVFLTGIDTISVELPSTTSRQNPNATDLTYADFGYVTFSRTVSNKTFEGEDTFINDLYYGTPNHSYNIYIDKIEFIPITQSVLDYTEKQNIEKTQKIVNDLFVN

SEQ ID NO: 1367 - protein, 681 aa, Bacillus thuringiensis; identical to SEQ ID NO: 1366

SEQ ID NO: 1368 - protein, 1176 aa, Bacillus thuringiensis
MDNNPNINECIPYNCLSNPEVEVLGGERIETGYTPIDISLSLTQFLLSEFVPGAGFVLGLVDIIWGIFGPSQWDAFLVQIEQLINQRIEEFARNQAISRLEGLSNLYQIYAESFREWEADPTNPALREEMRIQFNDMNSALTTAIPLFAVQNYQVPLLSVYVQAANLHLSVLRDVSVFGQRWGFDAATINSRYNDLTRLIGNYTDYAVRWYNTGLERVWGPDSRDWVRYNQFRRELTLTVLDIVALFSNYDSRRYPIRTVSQLTREIYTNPVLENFDGSFRGMAQRIEQNIRQPHLMDILNSITIYTDVHRGFNYWSGHQITASPVGFSGPEFAFPLFGNAGNAAPPVLVSLTGLGIFRTLSSPLYRRIILGSGPNNQELFVLDGTEFSFASLTTNLPSTIYRQRGTVDSLDVIPPQDNSVPPRAGFSHRLSHVTMLSQAAGAVYTLRAPTFSWQHRSAEFNNIIPSSQITQIPLTKSTNLGSGTSVVKGPGFTGGDILRRTSPGQISTLRVNITAPLSQRYRVRIRYASTTNLQFHTSIDGRPINQGNFSATMSSGSNLQSGSFRTVGFTTPFNFSNGSSVFTLSAHVFNSGNEVYIDRIEFVPAEVTFEAEYDLERAQKAVNELFTSSNQIGLKTDVTDYHIDQVSNLVECLSDEFCLDEKQELSEKVKHAKRLSDERNLLQDPNFRGINRQLDRGWRGSTDITIQGGDDVFKENYVTLLGTFDECYPTYLYQKIDESKLKAYTRYQLRGYIEDSQDLEIYLIRYNAKHETVNVPGTGSLWPLSAQSPIGKCGEPNRCAPHLEWNPDLDCSCRDGEKCAHHSHHFSLDIDVGCTDLNEDLGVWVIFKIKTQDGHARLGNLEFLEEKPLVGEALARVKRAEKKWRDKREKLEWETNIVYKEAKESVDALFVNSQYDQLQADTNIAMIHAADKRVHSIREAYLPELSVIPGVNAAIFEELEGRIFTAFSLYDARNVIKNGDFNNGLSCWNVKGHVDVEGQNNQRSVLVVPEWEAEVSQEVRVCPGRGYILRVTAYKEGYGEGCVTIHEIENNTDELKFSNCVEEEIYPNNTVTCNDYTVNQEEYGGAYTSRNRGYNEAPSVPADYASVYEEKSYTDGRRENPCEFNRGYRDYTPLPVGYVTKELEYFPETDKVWIEIGETEGTFIVDSVQLLLMEE

SEQ ID NO: 1369 - protein, 1176 aa, Bacillus thuringiensis; identical to SEQ ID NO: 1368

SEQ ID NO: 1370 - protein, 1176 aa, Bacillus thuringiensis
MDNNPNINECIPYNCLSNPEVEVLGGERIETGYTPIDISLSLTQFLLSEFVPGAGFVLGLVDIIWGIFGPSQWDAFLVQIEQLINQRIEEFARNQAISRLEGLSNLYQIYAESFREWEADPTNPALREEMRIQFNDMNSALTTAIPLFAVQNYQVPLLSVYVQAANLHLSVLRDVSVFGQRWGFDAATINSRYNDLTRLIGNYTDYAVRWYNTGLERVWGPDSRDWVRYNQFRRELTLTVLDIVALFSNYDSRRYPIRTVSQLTREIYTNPVLENFDGSFRGMAQRIEQNIRQPHLMDILNSITIYTDVHRGFNYWSGHQITASPVGFSGPEFAFPLFGNAGNAAPPVLVSLTGLGIFRTLSSPLYRRIILGSGPNNQELFVLDGTEFSFASLTTNLPSTIYRQRGTVDSLDVIPPQDNSVPPRAGFSHRLSHVTMLSQAAGAVYTLRAPTFSWQHRSAEFNNIIPSSQITQIPLTKSTNLGSGTSVVKGPGFTGGDILRRTSPGQISTLRVNITAPLSQRYRVRIRYASTTNLQFHTSIDGRPINQGNFSATMSSGSNLQSGSFRTVGFTTPFNFSNGSSVFTLSAHVFNSGNEVYIDRIEFVPAEVTFEAEYDLERAQKAVNELFTSSNQIGLKTDVTDYHIDQVSNLVECLSDEFCLDEKQELSEKVKHAKRLSEERNLLQDPNFRGINRQLDRGWRGSTDITIQGGDDVFKENYVTLLGTFDECYPTYLYQKIDESKLKAYTRYQLRGYIEDSQDLEIYLIRYNAKHETVNVPGTGSLWPLSAQSPIGKCGEPNRCAPHLEWNPDLDCSCRDGEKCAHHSHHFSLDIDVGCTDLNEDLGVWVIFKIKTQDGHARLGNLEFLEEKPLVGEALARVKRAEKKWRDKREKLEWETNIVYKEAKESVDALFVNSQYDQLQADTNIAMIHAADKRVHSIREAYLPELSVIPGVNAAIFEELEGRIFTAFSLYDARNVIKNGDFNNGLSCWNVKGHVDVEEQNNQRSVLVLPEWEAEVSQEVRVCPGRGYILRVTAYKEGYGEGCVTIHEIENNTDELKFSNCVEEEIYPNNTVTCNDYTVNQEEYGGAYTSRNRGYNEAPSVPADYASVYEEKSYTDGRRENPCEFNRGYRDYTPLPVGYVTKELEYFPETDKVWIEIGETEGTFIVDSVELLLMEE

SEQ ID NO: 1371 - protein, 3826 aa, Bacillus thuringiensis
CCTGGGTCAAAAATTGATATTTAGTAAAATTAGTTGCACTTTGTGCATTTTTTCATAAGATGAGTCATATGTTTTAAATTGTAGTAATGAAAAACAGTATTATATCATAATGAATTGGTATCTTAATAAAAGAGATGGAGGTAACTTATGGATAACAATCCGAACATCAATGAATGCATTCCTTATAATTGTTTAAGTAACCCTGAAGTAGAAGTATTAGGTGGAGAAAGAATAGAAACTGGTTACACCCCAATCGATATTTCCTTGTCGCTAACGCAATTTCTTTTGAGTGAATTTGTTCCCGGTGCTGGATTTGTGTTAGGACTAGTTGATATAATATGGGGAATTTTTGGTCCCTCTCAATGGGACGCATTTCTTGTACAAATTGAACAGTTAATTAACCAAAGAATAGAAGAATTCGCTAGGAACCAAGCCATTTCTAGATTAGAAGGACTAAGCAATCTTTATCAAATTTACGCAGAATCTTTTAGAGAGTGGGAAGCAGATCCTACTAATCCAGCATTAAGAGAAGAGATGCGTATTCAATTCAATGACATGAACAGTGCCCTTACAACCGCTATTCCTCTTTTGGCAGTTCAAAATTATCAAGTTCCTCTTTTATCAGTATATGTTCAAGCTGCAAATTTACATTTATCAGTTTTGAGAGATGTTTCAGTGTTTGGACAAAGGTGGGGATTTGATGCCGCGACTATCAATAGTCGTTATAATGATTTAACTAGGCTTATTGGCAACTATACAGATTATGCTGTGCGCTGGTACAATACGGGATTAGAGCGTGTATGGGGACCGGATTCTAGAGATTGGGTAAGGTATAATCAATTTAGAAGAGAGCTAACACTTACTGTATTAGATATCGTTGCTCTATTCTCAAATTATGATAGTCGAAGGTATCCAATTCGAACAGTTTCCCAATTAACAAGAGAAATTTATACGAACCCAGTATTAGAAAATTTTGATGGTAGTTTTCGTGGAATGGCTCAGAGAATAGAACAGAATATTAGGCAACCACATCTTATGGATATCCTTAATAGTATAACCATTTATACTGATGTGCATAGAGGCTTTAATTATTGGTCAGGGCATCAAATAACAGCTTCTCCTGTAGGGTTTTCAGGACCAGAATTCGCATTCCCTTTATTTGGGAATGCGGGGAATGCAGCTCCACCCGTACTTGTCTCATTAACTGGTTTGGGGATTTTTAGAACATTATCTTCACCTTTATATAGAAGAATTATACTTGGTTCAGGCCCAAATAATCAGGAACTGTTTGTCCTTGATGGAACGGAGTTTTCTTTTGCCTCCCTAACGACCAACTTGCCTTCCACTATATATAGACAAAGGGGTACAGTCGATTCACTAGATGTAATACCGCCACAGGATAATAGTGTACCACCTCGTGCGGGATTTAGCCATCGATTGAGTCATGTTACAATGCTGAGCCAAGCAGCTGGAGCAGTTTACACCTTGAGAGCTCCAACGTTTTCTTGGCAGCATCGCAGTGCTGAATTTAATAATATAATTCCTTCATCACAAATTACACAAATACCTTTAACAAAATCTACTAATCTTGGCTCTGGAACTTCTGTCGTTAAAGGACCAGGATTTACAGGAGGAGATATTCTTCGAAGAACTTCACCTGGCCAGATTTCAACCTTAAGAGTAAATATTACTGCACCATTATCACAAAGATATCGGGTAAGAATTCGCTACGCTTCTACTACAAATTTACAATTCCATACATCAATTGACGGAAGACCTATTAATCAGGGTAATTTTTCAGCAACTATGAGTAGTGGGAGTAATTTACAGTCCGGAAGCTTTAGGACTGTAGGTTTTACTACTCCGTTTAACTTTTCAAATGGATCAAGTGTATTTACGTTAAGTGCTCATGTCTTCAATTCAGGCAATGAAGTTTATATAGATCGAATTGAATTTGTTCCGGCAGAAGTAACCTTTGAGGCAGAATATGATTTAGAAAGAGCACAAAAGGCGGTGAATGAGCTGTTTACTTCTTCCAATCAAATCGGGTTAAAAACAGATGTGACGGATTATCATATTGATCAAGTATCCAATTTAGTTGAGTGTTTATCAGATGAATTTTGTCTGGATGAAAAACAAGAATTGTCCGAGAAAGTCAAACATGCGAAGCGACTTAGTGATGAGCGGAATTTACTTCAAGATCCAAACTTCAGAGGGATCAATAGACAACTAGACCGTGGCTGGAGAGGAAGTACGGATATTACCATCCAAGGAGGCGATGACGTATTCAAAGAGAATTACGTTACGCTATTGGGTACCTTTGATGAGTGCTATCCAACGTATTTATATCAAAAAATAGATGAGTCGAAATTAAAAGCCTATACCCGTTATCAATTAAGAGGGTATATCGAAGATAGTCAAGACTTAGAAATCTATTTAATTCGCTACAATGCAAAACATGAAACAGTAAATGTGCCAGGTACGGGTTCCTTATGGCCGCTTTCAGCCCAAAGTCCAATCGGAAAGTGTGGAGAGCCGAATCGATGCGCGCCACACCTTGAATGGAATCCTGACTTAGATTGTTCGTGTAGGGATGGAGAAAAGTGTGCCCATCATTCGCATCATTTCTCCTTAGACATTGATGTAGGATGTACAGACTTAAATGAGGACCTAGGTGTATGGGTGATCTTTAAGATTAAGACGCAAGATGGGCACGCAAGACTAGGGAATCTAGAGTTTCTCGAAGAGAAACCATTAGTAGGAGAAGCGCTAGCTCGTGTGAAAAGAGCGGAGAAAAAATGGAGAGACAAACGTGAAAAATTGGAATGGGAAACAAATATCGTTTATAAAGAGGCAAAAGAATCTGTAGATGCTTTATTTGTAAACTCTCAATATGATCAATTACAAGCGGATACGAATATTGCCATGATTCATGCGGCAGATAAACGTGTTCATAGCATTCGAGAAGCTTATCTGCCTGAGCTGTCTGTGATTCCGGGTGTCAATGCGGCTATTTTTGAAGAATTAGAAGGGCGTATTTTCACTGCATTCTCCCTATATGATGCGAGAAATGTCATTAAAAATGGTGATTTTAATAATGGCTTATCCTGCTGGAACGTGAAAGGGCATGTAGATGTAGAAGAACAAAACAACCAACGTTCGGTCCTTGTTGTTCCGGAATGGGAAGCAGAAGTGTCACAAGAAGTTCGTGTCTGTCCGGGTCGTGGCTATATCCTTCGTGTCACAGCGTACAAGGAGGGATATGGAGAAGGTTGCGTAACCATTCATGAGATCGAGAACAATACAGACGAACTGAAGTTTAGCAACTGCGTAGAAGAGGAAATCTATCCAAATAACACGGTAACGTGTAATGATTATACTGTAAATCAAGAAGAATACGGAGGTGCGTACACTTCTCGTAATCGAGGATATAACGAAGCTCCTTCCGTACCAGCTGATTATGCGTCAGTCTATGAAGAAAAATCGTATACAGATGGACGAAGAGAGAATCCTTGTGAATTTAACAGAGGGTATAGGGATTACACGCCACTACCAGTTGGTTATGTGACAAAAGAATTAGAATACTTCCCAGAAACCGATAAGGTATGGATTGAGATTGGAGAAACGGAAGGAACATTTATCGTGGACAGCGTGGAATTACTCCTTATGGAGGAATAGTCTCATGCAAACTCAGGTTTAAATATCGTTTTCAAATCAATTGTCCAAGAGCAGCATTACAAATAGATAAGTAATTTGTTGTAATGAAAAACGGACATCACCTCCATTGAAACGGAGTGATGTCCGTTTTACTATGTTATTTTCTAGT

SEQ ID NO: 1372 - protein, 1156 aa, Bacillus thuringiensis
MDNNPNINECIPYNCLSNPEVEVLGGERIETGYTPIDISLSLTQFLLSEFVPGAGFVLGLVDIIWGIFGPSQWDAFLVQIEQLINQRIEEFARNQAISRLEGLSNLYQIYAESFREWEADPTNPALREEMRIQFNDMNSALTTAIPLFAVQNYQVPLLSVYVQAANLHLSVLRDVSVFGQRWGFDAATINSRYNDLTRLIGNYTDHAVRWYNTGLERVWGPDSRDWIRYNQFRRELTLTVLDIVSLFPNYDSRTYPIRTVSQLTREIYTNPVLENFDGSFRGSAQGIEGSIRSPHLMDILNSITIYTDAHRGEYYWSGHQIMASPVGFSGPEFTFPLYGTMGNAAPQQRIVAQLGQGVYRTLSSTLYRRPFNIGINNQQLSVLDGTEFAYGTSSNLPSAVYRKSGTVDSLDEIPPQNNNVPPRQGFSHRLSHVSMFRSGFSNSSVSIIRAPMFSWIHRSAEFNNIIPSSQITQIPLTKSTNLGSGTSVVKGPGFTGGDILRRTSPGQISTLRVNITAPLSQRYRVRIRYASTTNLQFHTSIDGRPINQGNFSATMSSGSNLQSGSFRTVGFTTPFNFSNGSSVFTLSAHVFNSGNEVYIDRIEFVPAEVTFEAEYDLERAQKAVNELFTSSNQIGLKTDVTDYHIDQVSNLVECLSDEFCLDEKKELSEKVKHAKRLSDERNLLQDPNFRGINRQLDRGWRGSTDITIQGGDDVFKENYVTLLGTFDECYPTYLYQKIDESKLKAYTRYQLRGYIEDSQDLEIYLIRYNAKHETVNVPGTGSLWPLSAPSPIGKCAHHSHHFSLDIDVGCTDLNEDLGVWVIFKIKTQDGHERLGNLEFLEGRAPLVGEALARVKRAEKKWRDKREKLEWETNIVYKEAKESVDALFVNSQYDRLQADTNIAMIHAADKRVHSIREAYLPELSVIPGVNAAIFEELEGRIFTAFSLYDARNVIKNGDFNNGLSCWNVKGHVDVEEQNNHRSVLVVPEWEAEVSQEVRVCPGRGYILRVTAYKEGYGEGCVTIHEIENNTDELKFSNCVEEEVYPNNTVTCNDYTATQEEYEGTYTSRNRGYDGAYESNSSVPADYASAYEEKAYTDGRRDNPCESNRGYGDYTPLPAGYVTKELEYFPETDKVWIEIGETEGTFIVDSVELLLMEE

SEQ ID NO: 1373 - protein, 2815 aa, Bacillus thuringiensis
AAATTGTAGTAATGAAAAACAGTATTATATCATAATGAATTGGTATCTTAATAAAAGAGATGGAGGTAACTTATGGATAACAATCCGAACATCAATGAATGCATTCCTTATAATTGTTTAAGTAACCCTGAAGTAGAAGTATTAGGTGGAGAAAGAATAGAAACTGGTTACACCCCAATCGATATTTCCTTGTCGCTAACGCAATTTCTTTTGAGTGAATTTGTTCCCGGTGCTGGATTTGTGTTAGGACTAGTTGATATAATATGGGGAATTTTTGGTCCCTCTCAATGGGACGCATTTCTTGTACAAATTGAACAGTTAATTAACCAAAGAATAGAAGAATTCGCTAGGAACCAAGCCATTTCTAGATTAGAAGGACTAAGCAATCTTTATCAAATTTACGCAGAATCTTTTAGAGAGTGGGAAGCAGATCCTACTAATCCAGCATTAAGAGAAGAGATGCGTATTCAATTCAATGACATGAACAGTGCCCTTACAACCGCTATTCCTCTTTTTGCAGTTCAAAATTATCAAGTTCCTCTTTTATCAGTATATGTTCAAGCTGCAAATTTACATTTATCAGTTTTGAGAGATGTTTCAGTGTTTGGACAAAGGTGGGGATTTGATGCCGCGACTATCAATAGTCGTTATAATGATTTAACTAGGCTTATTGGCAACTATACAGATCATGCTGTACGCTGGTACAATACGGGATTAGAGCGTGTATGGGGACCGGATTCTAGAGATTGGATAAGATATAATCAATTTAGAAGAGAATTAACACTAACTGTATTAGATATCGTTTCTCTATTTCCGAACTATGATAGTAGAACGTATCCAATTCGAACAGTTTCCCAATTAACAAGAGAAATTTATACAAACCCAGTATTAGAAAATTTTGATGGTAGTTTTCGAGGCTCGGCTCAGGGCATAGAAGGAAGTATTAGGAGTCCACATTTGATGGATATACTTAACAGTATAACCATCTATACGGATGCTCATAGAGGAGAATATTATTGGTCAGGGCATCAAATAATGGCTTCTCCTGTAGGGTTTTCGGGGCCAGAATTCACTTTTCCGCTATATGGAACTATGGGAAATGCAGCTCCACAACAACGTATTGTTGCTCAACTAGGTCAGGGCGTGTATAGAACATTATCGTCCACTTTATATAGAAGACCTTTTAATATAGGGATAAATAATCAACAACTATCTGTTCTTGACGGGACAGAATTTGCTTATGGAACCTCCTCAAATTTGCCATCCGCTGTATACAGAAAAAGCGGAACGGTAGATTCGCTGGATGAAATACCGCCACAGAATAACAACGTGCCACCTAGGCAAGGATTTAGTCATCGATTAAGCCATGTTTCAATGTTTCGTTCAGGCTTTAGTAATAGTAGTGTAAGTATAATAAGAGCTCCTATGTTCTCTTGGATACATCGTAGTGCTGAATTTAATAATATAATTCCTTCATCACAAATTACACAAATACCTTTAACAAAATCTACTAATCTTGGCTCTGGAACTTCTGTCGTTAAAGGACCAGGATTTACAGGAGGAGATATTCTTCGAAGAACTTCACCTGGCCAGATTTCAACCTTAAGAGTAAATATTACTGCACCATTATCACAAAGATATCGGGTAAGAATTCGCTACGCTTCTACCACAAATTTACAATTCCATACATCAATTGACGGAAGACCTATTAATCAGGGGAATTTTTCAGCAACTATGAGTAGTGGGAGTAATTTACAGTCCGGAAGCTTTAGGACTGTAGGTTTTACTACTCCGTTTAACTTTTCAAATGGATCAAGTGTATTTACGTTAAGTGCTCATGTCTTCAATTCAGGCAATGAAGTTTATATAGATCGAATTGAATTTGTTCCGGCAGAAGTAACCTTTGAGGCAGAATATGATTTAGAAAGAGCACAAAAGGCGGTGAATGAGCTGTTTACTTCTTCCAATCAAATCGGGTTAAAAACAGATGTGACGGATTATCATATTGATCAAGTATCCAATTTAGTTGAGTGTTTATCTGATGAATTTTGTCTGGATGAAAAAAAAGAATTGTCCGAGAAAGTCAAACATGCGAACGACTTAGTGATGAGCGGAATTTACTTCAAGATCCAAACTTTAGAGGGATCAATAGACAACTAGACCGTGGCTGGAGAGGAAGTACGGATATTACCATCCAAGGAGGCGATGACGTATTCAAAGAGAATTACGTTACGCTATTGGGTACCTTTGATGAGTGCTATCCAACGTATTTATATCAAAAAATAGATGAGTCGAAATTAAAAGCCTATACCCGTTACCAATTAAGAGGGTATATCGAAGATAGTCAAGACTTAGAAATCTATTTAATTCGCTACAATGCCAAACACGAAACAGTAAATGTGCCAGGTACGGGTTCCTTATGGCCGCTTTCAGCCCCAAGTCCAATCGGAAAATGTGCCCATCATTCCCATCATTTCTCCTTGGACATTGATGTTGGATGTACAGACTTAAATGAGGACTTAGGTGTATGGGTGATATTCAAGATTAAGACGCAAGATGGCCATGCAAGACTAGGAAATCTAGAATTTCTCGAAGAGAAACCATTAGTAGGAGAAGCACTAGCTCGTGTGAAAAGAGCGGAGAAAAAATGGAGAGACAAACGTGAAAAATTGGAATGGGAAACAAATATTGTTTATAAAGAGGCAAAAGAATCTGTAGATGCTTTATTTGTAAACTCTCAATATGATAGATTACAAGCGGATACCAACATCGCGATGATTCATGCGGCAGATAAACGCGTTCATAGCATTCGAGA

SEQ ID NO: 1374 - protein, 1181 aa, Bacillus thuringiensis
MDNNPNINECIPYNCLSNPEVEVLGGERIETGYTPIDISLSLTQFLLSEFVPGAGFVLGLVDIIWGIFGPSQWDAFLVQIEQLINQRIEEFARNQAISRLEGLSNLYQIYAESFREWEADPTNPALREEMRIQFNDMNSALTTAIPLFAVQNYQVPLLSVYVQAANLHLSVLRDVSVFGQRWGFDAATINSRYNDLTRLIGNYTDHAVRWYNTGLERVWGPDSRDWIRYNQFRRELTLTVLDIVSLFPNYDSRTYPIRTVSQLTREIYTNPVLENFDGSFRGSAQGIEGSIRSPHLMDILNSITIYTDAHRGEYYWSGHQIMASPVGFSGPEFTFPLYGTMGNAAPQQRIVAQLGQGVYRTLSSTLYRRPFNIGINNQQLSVLDGTEFAYGTSSNLPSAVYKKSGTVDSLDEIPPQNNNVPPRQGFSHRLSHVSMFRSGFSNSSVSIIRAPMFSWIHRSAEFNNIIPSSQITQIPLTKSTNLGSGTSVVKGPGFTGGDILRRTSPGQISTLRVNITAPLSQRYRVGIRYASTTNLQFHTSIDGRPINQGNFSATMSSGSNLQSGSFRTVGFTTPFNFSNGSSVFTLSAHVFNSGNEVYIDRIEFVPAEVTFEAEYDLERAQKAVNELFTSSNQIGLKTDVTDYHIDQVSNLVECLSDEFCLDEKQELSEKVKHAKRLSDERNLLQDPNFRGINRQLDRGWRGSTDITIQGGDDVFKENCVTLLGTFDECYPTYLYQKIDESKLKAYTRYQLRGYIEDSQDLEIYLIRYNAKHETVNVPGTGSLWPLSAQSPIGKCGEPNRCAPHLEWNPDLDCSCRDGEKCAHHSHHFSLDIDVGCTDLNEDLGVWVIFKIKTQDGHARLGNLEFLEEKPLVGEALARVKRAEKKWRDKREKLEWETNIVYKEAKESVDALFVNSQYDQLQADTNIAMIHAADKRVHSIREAYLPELSVIPGVNAAIFEELEGRIFTAFSLYDARNVIKNGDFNNGLSCWNVKGHVDVEEQNNQRSVLVVPEWEAEVSQEVRVCPGRGYILRVTAYKEGYGEGCVTIHEIENNTDELKFSNCVEEEVYPNNTVTCNDYTATQEEYEGTYTSRNRGYDGAYESNSSVPADYASAYEEKAYTDGRRDNPCESNRGYGDYTPLPAGYVTKELEYFPETDKVWIEIGETEGTFIVDSVELLLMEE

SEQ ID NO: 1375 - protein, 859 aa, Bacillus thuringiensis
MDILNSITIYTDAHRGEYYWSGHQIMASPVGFSGPEFTFPLYGTMGNAAPQQRIVAQLGQGVYRTLSSTLYRRPFNIGINNQQLSVLDGTEFAYGTSSNLPSAVYRKSGTVDSLDEIPPQNNNVPPRQGFSHRLSHVSMFRSGFSNSSVSIIRAPMFSWIHRSAEFNNIIPSSQITQIPLTKSTNLGSGTSVVKGPGFTGGDILRRTSPGQISTLRVNITAPLSQRYRVRIRYASTTNLQFHTSIDGRPINQGNFSATMSSGSNLQSGSFRTVGFTTPFNFSNGSSVFTLSAHVFNSGNEVYIDRIEFVPAEVTFEAEYDLERAQKAVNELFTSSNQIGLKTDVTDYHIDQVSNLVECLSDEFCLDEKKELSEKVKHAKRLSDERNLLQDPNFRGINRQLDRGWRGSTDITIQGGDDVFKENYVTLLGTFDECYPTYLYQKIDESKLKAYTRYQLRGYIEDSQDLEIYLIRYNAKHETVNVPGTGSLWPLSAPSPIGKCAHHSHHFSLDIDVGCTDLNEDLGVWVIFKIKTQDGHARLGNLEFLEEKPLVGEALARVKRAEKKWRDKREKLEWETNIVYKEAKESVDALFVNSQYDRLQADTNIAMIHAADKRVHSIREAYLPELSVIPGVNAAIFEELEGRIFTAFSLYDARNVIKNGDFNNGLSCWNVKGHVDVEEQNNHRSVLVVPEWEAEVSQEVRVCPGRGYILRVTAYKEGYGEGCVTIHEIENNTDELKFSNCVEEEVYPNNTVTCNDYTATQEEYEGTYTSRNRGYDGAYESNSSVPADYASAYEEKAYTDGRRDNPCESNRGYGDYTPLPAGYVTKELEYFPETDKVWIEIGETEGTFIVDSVELLLMEE

SEQ ID NO: 1376 - protein, 1155 aa, Bacillus thuringiensis; identical to SEQ ID NO: 69

SEQ ID NO: 1377 - protein, 1155 aa, Bacillus thuringiensis
MDNNPNINECIPYNCLSNPEVEVLGGERIETGYTPIDISLSLTQFLLSEFVPGAGFVLGLVDIIWGIFGPSQWDAFLVQIEQLINQRIEEFARNQAISRLEGLSNLYQIYAESFREWEADPTNPALREEMRIQFNDMNSALTTAIPLFAVQNYQVPLLSVYVQAANLHLSVLRDVSVFGQRWGFDAATINSRYNDLTRLIGNYTDHAVRWYNTGLERVWGPDSRDWIRYNQFRRELTLTVLDIVSLFPNYDSRTYPIRTVSQLTREIYTNPVLENFDGSFRGSAQGIEGSIRSPHLMDILNSITIYTDAHRGEYYWSGHRIMASPVGFSGPEFTFPLYGTMGNAAPQQRIVAQLGQGVYRTLSSTLYRRPFNIGINNQQLSVLDGTEFAYGTSSNLPSAVYRKSGTVDSLDEIPPQNNNVPPRQGFSHRLSHVSMFRSGFSNSSVSIIRAPMFSWIHRSAEFNNIIPSSQITQIPLTKSTNLGSGTSVVKGPGFTGGDILRRTSPGQISTLRVNITAPLSQRYRVRIRYASTTNLQFHTSIDGRPINQGNFSATMSSGSNLQSGSFRTVGFTTPFNSSNGSSVFTLSAHVFNSGNEVYIDRIEFVPAEVTFEAEYDLERAQKAVNELFTSSNQIGLKTDVTDYHIDQVSNLVECLSDEFCLDEKKELSEKVKHAKRLSDERNLLQDPNFRGINRQLDRGWRGSTDITIQGGDDVFKENYVTLLGTFDECYPTYLYQKIDESKLKAYTRYQLRGYIEDSQDLEIYLIRYNAKRETVNVPGTGSLWPLSAPSPIGKCAHHSHHFSLDIDVGCTDLNEDLGVWVIFKIKTQDGHARLGNLEFLEEKPLVGEALARVKRAEKKWRDKREKLEWETNIVYKEAKESVDALFVNSQYGRLQADTNIAMIHAADKRVHSIREAYLPELSVIPGVNAAIFEELEGRIFTAFSLYDARNVIKNGDFNNGLSCWNVKGHVDVEEQNNHRSVLVVPEWEAEVSQEVRVCPGRGYILRVTAYKEGYGEGCVTIHEIENNTDELKFSNCVEEEVYPNNTVTCNDYTATQEEYEGTYTSRNRGYDGAYESNSSVPADYASAYEEKAYTDGRRDNPCESNRGYGDYTPLPAGYVTKELEYFPETDKVWIEIGETEGTFIVDSVELLLMEE

SEQ ID NO: 1378 - protein, 1181 aa, Bacillus thuringiensis
MDNNPNINECIPYNCLSNPEVEVLGGERIETGYTPIDISLSLTQFLLSEFVPGAGFVLGLVDIIWGIFGPSQWDAFLVQIEQLINQRIEEFARNQAISRLEGLSNLYQIYAESFREWEADPTNPALREEMRIQFNDMNSALTTAIPLFAVQNYQVPLLSVYVQAANLHLSVLRDVSVFGQRWGFDAATINSRYNDLTRLIGNYTDHAVRWYNTGLERVWGPDSRDWIRYNQFRRELTLTVLDIVSLFPNYDSRTYPIRTVSQLTREIYTNPVLENFDGSFRGSAQGIEGSIRSPHLMDILNSITIYTDAHRGEYYWSGHQIMASPVGFSGPEFTFPLYGTMGNAAPQQRIVAQLGQGVYRTLSSTLYRRPFNIGINNQQLSVLDGTEFAYGTSSNLPSAVYRKSGTVDSLDEIPPQNNNVPPRQGFSHRLSHVSMFRSGLSNSSVSIIRAPMFSWIHRSAEFNNIIPSSQITQIPLTKSTNLGSGTSVVKGPGFTGGDILRRTSPGQISTLRVNITAPLSQRYRVRIRYASTTNLQFHTSIDGRPINQGNFSATMSSGSNLQSGSFRTVGFTTPFNFSNGSSVFTLSAHVFNSGNEVYIDRIEFVPAEVTFEAEYDLERAQKAVNELFTSSNQIGLKTDVTDYHIDQVSNLVECLSDEFCLDEKKELSEKVKHAKRLSDERNLLQDPNFRGINRQLDRGWRGSTDITIQGGDDVFKENYVTLLGTFDECYPTYLYQKIDESKLKAYTRYQLRGYIEDSQDLEIYLIRYNAKHETVNVPGTGSLWPLSAQSPIGKCGEPNRCAPHLEWNPDLDCSCRDGEKCAHHSHHFSLDIDVGCTDLNEDLGVWVIFKIKTQDGHARLGNLEFLEEKPLVGEALARVKRAEKKWRDKREKLEWETNIVYKEAKESVDALFVNSRYDRLQADTNIAMIHAADKRVHSIREAYLPELSVIPGVNAAIFEELEGRIFTAFSLYDARNVIKNGDFNNGLSCWNVKGHVDVEEQNNHRSVLVVPEWEAEVSQEVRVCPGRGYILRVTAYKEGYGEGCVTIHEIENSTDELKFSNCVEEEVYPNNTVTCNDYTATQEEYEGTYTSRNRGYDGAYESNSSVPADYASAYEEKAYTDGRRDNPCESNRGYGDYTPLPAGYVTKELEYFPETDKVWIEIGETEGTFIVDSVDLLLMEE

SEQ ID NO: 1379 - protein, 1155 aa, Bacillus thuringiensis
MDNNPNINECIPYNCLSNPEVEVLGGERIETGYTPIDISLSLTQFLLSEFVPGAGFVLGLVDIIWGIFGPSQWDAFLVQIEQLINQRIEEFARNQAISRLEGLSNLYQIYAESFREWEADPTNPALREEMRIQFNDMNSALTTAIPLFAVQNYQVPLLSVYVQAANLHLSVLRDVSVFGQRWGFDAATINSRYNDLTRLIGNYTDHAVRWYNTGLERVWGPDSRDWIRYNQFRRELTLTVLDIVSLFPNYDSRTYPIRTVSQLTREIYTNPVLENFDGSFRGSAQGIEGSIRSPHLMDILNSITIYTDAHRGEYYWSGHQIMASPVGFSGPEFTFPLYGNMGNAAPQQRIVAQLGQGVYRTLSSTLYRRPFNIGINNQQLSVLDGTEFAYGTSSNLPSAVYRKSGTVDSLDEIPPQNNNVPPRQGFSHRLSHVSMFRSGFSNSSVSIIRAPMFSWIHRSAEFNNIIPSSQITQIPLTKSTNLGSGTSVVKGPGFTGGDILRRTSPGQISTLRVNITAPLSQRYRVRIRYASTTNLQFHTSIDGRPINQGNFSATMSSGSNLQSGSFRTVGFTTPFNFSNGSSVFTLSAHVFNSGNEVYIDRIEFVPAEVTFEAEYDLERAQKAVNELFTSSNQIGLKTDVTDYHIDQVSNLVECLSDEFCLDEKKELSEKVKHAKRLSDERNLLQDPNFRGINRQLDRGWRGSTDITIQGGDDVFKENYVTLLGTFDECYPTYLYQKIDESKLKAYTRYQLRGYIEDSQDLEIYLIRYNAKHETVNVPGTGSLWPLSAPSPIGKCAHHSHHFSLDIDVGCTDLNEDLGVWVIFKIKTQDGHARLGNLEFLEEKPLVGEALARVKRAEKKWRDKREKLEWETNIVYKEAKESVDALFVNSQYDRLQADTNIAMIHAADKRVHSIREAYLPELSVIPGVNAAIFEELEGRIFTAFSLYDARNVIKNGDFNNGLSCWNVKGHVDVEEQNNHRSVLVVPEWEAEVSQEVRVCPGRGYILRVTAYKEGYGEGCVTIHEIENNTDELKFSNCVEEEVYPNNTVTCNDYTATQEEYEGTYTSRNRGYDGAYESNSSVPADYASAYEEKAYTDGRRDNPCESNRGYGDYTPLPAGYVTKELEYFPETDKVWIEIGETEGTFIVDSVELLLMEE

SEQ ID NO: 1380 - protein, 793 aa, Bacillus thuringiensis
MQCVPYNCLSNPEVEVLGGERIETGYTPIDISLSLTQFLLSEFVPGAGFVLGLVDIIWGIFGPSQWDAFLVQIEQLINQRIEEFARNQAISRLEGLSNLYQIYAESFRAWEADPTNPALRVEMRIQFNDMNSALTTAIPLFAVQNYQVPLLSVYVQAANLHLSVLRDVSVFGQRWGFDATTINSRYNDLTRLIGNYTDYAVRWYNTGLERVWGPDSRDWIRYNQFRRELTLTVLDIVSLFPNYDSRTYPIRTVSQLTREIYTNPVLEDFNGSFRGSAQGIEQSIRSPHLMDILNSITIYTDAHRGYYYWSGHQIMASPVGFSGPEFTFPLYGTMGNAAPQQRIVAQLGQGVYRTLSSTFYRSPFNIGINNQQLSVLDGTEFAYGTSSNLPSAVYRKSGTVDSLDEIPPQNNNVPPRQGFSHRLSHVSMFRSGFSNSSVSIIRAPMFSWIHRSAEFNNIIPSSQITQIPLTKSTNLGSGTSVVKGPGFTGGDILRRTSPGQISTLRVNITAPLSQRYRVRIRYASTTNLQFHTSIDGRPINQGNFSATMSSGSNLQSGSFRTAGFTTPFNFSNGSSVFTLSAHVFNSGNEVYIDRIEFVPAEVTFEAEYDLERAQKAVNALFTSSNQIGLKTDVTDYHIDQVSNLVECLSDEFCLDEKQELSEKVKHAKRLSDERNLLQDPNFRWINRQLDRGWRGSTDITIQGGDDVFKENYVTLPGTFDECYPTYLYQKIDESKLKAYTRYQLRGYIEDSQDLEIYLIRYNAKHETVNVPGTGSLWPLSAQSPIGRCGEPNR

SEQ ID NO: 1381 - protein, 373 aa, Bacillus thuringiensis; identical to SEQ ID NO: 93

SEQ ID NO: 1382 - protein, 2990 aa, Bacillus thuringiensis
TATGTTTTAAATTGTAGTAATGAAAAACAGTATTATATCATAATGAATTGGTATCTTAATAAAAGAGATGGAGGTAACTTATGGATAACAATCCGAACATCAATGAATGCATTCCTTATAATTGTTTAAGTAACCCTGAAGTAGAAGTATTAGGTGGAGAAAGAATAGAAACTGGTTACACCCCAATCGATATTTCCTTGTCGCTAACGCAATTTCTTTTGAGTGAATTTGTTCCCGGTGCTGGATTTGTGTTAGGACTAGTTGATATAATATGGGGAATTTTTGGTCCCTCTCAATGGGACGCATTTCTTGTACAAATTGAACAGTTAATTAACCAAAGAATAGAAGAATTCGCTAGGAACCAAGCCATTTCTAGATTAGAAGGACTAAGCAATCTTTATCAAATTTACGCAGAATCTTTTAGAGAGTGGGAAGCAGATCCTACTAATCCAGCATTAAGAGAAGAGATGCGTATTCAATTCAATGACATGAACAGTGCCCTTACAACCGCTATTCCTCTTTTGGCAGTTCAAAATTATCAAGTTCCTCTTTTATCAGTATATGTTCAAGCTGCAAATTTACATTTATCAGTTTTGAGAGATGTTTCAGTGTTTGGACAAAGGTGGGGATTTGATGCCGCGACTATCAATAGTCGTTATAATGATTTAACTAGGCTTATTGGCAACTATACAGATTATGCTGTACGCTGGTACAATACGGGATTAGAACGTGTATGGGGACCGGATTCTAGAGATTGGGTAAGGTATAATCAATTTAGAAGAGAATTAACACTAACTGTATTAGATATCGTTGCTCTGTTCCCGAATTATGATAGTAGAAGATATCCAATTCGAACAGTTTCCCAATTAACAAGAGAAATTTATACAAACCCAGTATTAGAAAATTTTGATGGTAGTTTTCGAGGCTCGGCTCAGGGCATAGAAAGAAGTATTAGGAGTCCACATTTGATGGATATACTTAACAGTATAACCATCTATACGGATGCTCATAGGGGTTATTATTATTGGTCAGGGCATCAAATAATGGCTTCTCCTGTCGGGTTTTCGGGGCCAGAATTCACGTTTCCGCTATATGGAACCATGGGAAATGCAGCTCCACAACAACGTATTGTTGCTCAACTAGGTCAGGGCGTGTATAGAACATTATCCTCTACTTTTTATAGAAGACCTTTTAATATAGGGATAAATAATCAACAACTATCTGTTCTTGACGGGACAGAATTTGCTTATGGAACCTCCTCAAATTTGCCATCCGCTGTATACAGAAAAAGCGGAACGGTAGATTCGCTGGATGAAATACCACCACAGAATAACAACGTGCCACCTAGGCAAGGATTTAGTCATCGATTAAGCCATGTTTCAATGTTTCGTTCAGGCTCTAGTAGTAGTGTAAGTATAATAAGAGCTCCTATGTTCTCTTGGATACATCGTAGTGCTGAATTTAATAATATAATTGCATCGGATAGTATTACTCAAATCCCTGCAGTGAAGGGAAACTTTCTTTTTAATGGTTCTGTAATTTCAGGACCAGGATTTACTGGTGGGGACTTAGTTAGATTAAATAGTAGTGGAAATAACATTCAGAATAGAGGGTATATTGAAGTTCCAATTCACTTCCCATCGACATCTACCAGATATCGAGTTCGTGTACGGTATGCTTCTGTAACCCCGATTCACCTCAACGTTAATTGGGGTAATTCATCCATTTTTTCCAATACAGTACCAGCTACAGCTACGTCATTAGATAATCTACAATCAAGTGATTTTGGTTATTTTGAAAGTGCCAATGCTTTTACATCTTCATTAGGTAATATAGTAGGTGTTAGAAATTTTAGTGGGACTGCAGGAGTGATAATAGACAGATTTGAATTTATTCCAGTTACTGCAACACTCGAGGCTGAATATAATCTGGAAAGAGCGCAGAAGGCGGTGAATGCGCTGTTTACGTCTACAAACCAACTAGGGCTAAAAACAAATGTAACGGATTATCATATTGATCAAGTGTCCAATTTAGTTACGTATTTATCGGATGAATTTTGTCTGGATGAAAAGCGAGAATTGTCCGAGAAAGTCAAACATGCGAAGCGACTCAGTGATGAACGCAATTTACTCCAAGATTCAAATTTCAAAGACATTAATAGGCAACCAGAACGTGGGTGGGGCGGAAGTACAGGGATTACCATCCAAGGAGGGGATGACGTATTTAAAGAAAATTACGTCACACTATCAGGTACCTTTGATGAGTGCTATCCAACATATTTGTATCAAAAAATCGATGAATCAAAATTAAAAGCCTTTACCCGTTATCAATTAAGAGGGTATATCGAAGATAGTCAAGACTTAGAAATCTATTTAATTCGCTACAATGCAAAACATGAAACAGTAAATGTGCCAGGTACGGGTTCCTTATGGCCGCTTTCAGCCCAAAGTCCAATCGGAAAGTGTGGAGAGCCGAATCGATGCGCGCCACACCTTGAATGGAATCCTGACTTAGATTGTTCGTGTAGGGATGGAGAAAAGTGTGCCCATCATTCGCATCATTTCTCCTTAGACATTGATGTAGGATGTACAGACTTAAATGAGGACCTAGGTGTATGGGTGATCTTTAAGATTAAGACGCAAGATGGGCACGCAAGACTAGGGAATCTAGAGTTTCTCGAAGAGAAACCATTAGTAGGAGAAGCGCTAGCTCGTGTGAAAAGAGCGGAGAAAAAATGGAGAGACAAACGTGAAAAATTGGAATGGGAAACAAATATCGTTTATAAAGAGGCAAAAGAATCTGTAGATGCTTTATTTGTAAACTCTCAATATGATCAATTACAAGCGGATACGAATATTGCCATGATTCATGCGGCAGATAAACGTGTTCATAGCATTCGAGAAGCTTGGCGTAATCATGGTCATAGCTGTTTCCTGTGTGAAATTGTTATCCGCTCACAATTCCACACAACATACGAGCCGGAAGCATAA

SEQ ID NO: 1383 - protein, 1177 aa, Bacillus thuringiensis
MDNNPNINECIPYNCLSNPEVEVLGGERIETGYTPIDISLSLTQFLLSEFVPGAGFVLGLVDIIWGIFGPSQWDAFLVQIEQLINQRIEEFARNQAISRLEGLSNLYQIYAESFREWEADPTNPALREEMRIQFNDMNSALTTAIPLLAVQNYQVPLLSVYVQAANLHLSVLRDVSVFGQRWGFDAATINSRYNDLTRLIGNYTDHAVRWYNTGLERVWGPDSRDWVRYNQFRRELTLTVLDIVALFPNYDSRRYPIRTVSQLTREIYTNPVLENFDGSFRGSAQGIERSIRSPHLMDILNSITIYTDAHRGYYYWSGHQIMASPVGFSGPEFTFPLYGTMGNAAPQQRIVAQLGQGVYRTLSSTFYRRSFNIGINNQQLSVLDGTEFAYGTSSNLPSAVYRKSGTVDSLDEIPPQNNNVPPRQGFSHRLSHVSMFRSGSSSSVSIIRAPMFSWIHRSAEFNNIIASDSITQIPAVKGNFLFNGSVISGPGFTGGDLVRLNSSGNNIQNRGYIEVPIHFPSTSTRYRVRVRYASVTPIHLYVNWGNSSIFSNTVPATATSLDNLQSSDFGYFESANAFTSSLGNIVGVRNFSGTAGVIIDRFEFIPVTATLEAEYNLERAQKAVNALFTSTNQLGLKTNVTDYHIDQVSNLVTCLSDEFCLDEKRELSEKVKHAKRLSDERNLLQDSNFKDINRQPERGWGGSTGITIQGGDDVFKENYVTLSGTFDECYPTYLYQKIDESKLKAFTRYQLRGYIEDSQDLEIYLIRYNAKHETVNVSGTGSLWPLSAQSPIGKCGEPNRFAPHLEWNPDLDCSCRDGEKCAHHSHHFSLDIDVGCTDLNEDLGVWVIFKIKTQDGHARLGNLEFLGEKPLVGEALARVKRAEKKWRDKREKLEWETNIVYKEAKESVDALFVNSQYDQLQADTNIAMIHAADKRVHSIREAYLPELSVIPGVNAAIFEELEGRIFTAFSLYDARNVIKNGDFNNGLSCWNVKGHVDVEEQNNHRSVLVVPEWEAEVPQEVRVCPGRGYILRVTAYKEGYGEGCVTIHEIENNTDELKFSNCVEEEVYPNNTVTCNDYTVNQEEYGGAYTSRNRGYNEAPSVPADYASVYEEKSYTDGRRENPCEFNRGYRDYTPLPVGYVTKELEYFPETDKVWIEIGETEGTFIVDSVQLLLMEE

SEQ ID NO: 1384 - protein, 609 aa, Bacillus thuringiensis
MDNNPNINECIPYNCLSNPEVEVLGGERIETGYTPIDISLSLTQFLLSEFVPGAGFVLGLVDIIWGIFGPSQWDAFLVQIEQLINQRIEEFARNQAISRLEGLSNLYQIYAESFREWEADPTNPALREEMRIQFNDMNSALTTAIPLLAVQNYQVPLLSVYVQAANLHLSVLRDVSVFGQRWGFDAATINSRYNDLTRLIGNYTDHAVRWYNTGLERVWGPDSRDWVRYNQFRRELTLTVLDIVALFPNYDSRRYPIRTVSQLTREIYTNPVLENFDGSFRGSAQGIERSIRSPHLMDILNSITIYTDAHRGYYYWSGHQIMASPVGFSGPEFTFPLYGTMGNAAPQQRIVAQLGQGVYRTLSSTFYRRPFNIGINNQQLSVLDGTEFAYGTSSNLPSAIYRKSGTVDSLDEIPPQNNNVPPRQGFSHRLSHVSMFRSGSSSSVSIIRAPMFSWIHRSAEFNNIIASDSITQIPAVKGNFLFNGSVISGPGFTGGDLVRLNSSGNNIQNRGYIEVPIHFPSTSTRYRVRVRYASVTPIHLYVNWGNSSIFSNTVPATATSLDNLQSSDFGYFESANAFTSSLGNIVGVRNFSGTAGVIIDRFEFIPVTA

SEQ ID NO: 1385 - protein, 609 aa, Bacillus thuringiensis
MDNNPNINECIPYNCLSNPEVEVLGGERIETGYTPIDISLSLTQFLLSEFVPGAGFVLGLVDIIWGIFGPSQWDAFLVQIEQLINQRIEEFARNQAISRLEGLSNLYQIYAESFREWEADPTNPALREEMRIQFNDMNSALTTAIPLLAVQNYQVPLLSVYVQAANLHLSVLRDVSVFGQRWGFDAATINSRYNDLTRLIGNYTDHAVRWYNTGLERVWGPDSRDWVRYNQFRRELTLTVLDIVALFPNYDSRRYPIRTVSQLTREIYTNPVLENFDGSFRGSAQGIERSIRSPHLMDILNSITIYTDAHRGYYYWSGHQIMASPVGFSGPEFTFPLYGTMGNAAPQQRIVAQLGQGVYRTLSSTFYRRPFNIGINNQQLSVLDGTEFAYGTSSNLPSAVYRKSGTVDSLDEIPPQNNNVPPRQGFSHRLSHVSMFRSGSSSSVSIIRAPMFSWIHRSAEFNNIIASDSITQIPAVKGNVLFNGSVISGPGFTGGDLVRLNSSGNNIQNRGYIEVPIHFPSTSTRYRVRVRYASVTPIHLYVNWGNSSIFSNTVPATATSLDNLQSSDFGYFESANAFTSSLGNIVGVRNFSGTAGVIIDRFEFIPVTA

SEQ ID NO: 1386 - protein, 4106 aa, Bacillus thuringiensis
TAGATTTTATATAAGTATAAAAAATAATAAGACTTTAATATAAGTTAAGGGAATACAAATCCTTAATGCATTGGTTAAATATTATAAACTCTAAAGCATGGATGATGGTTGAGAAGTAAGTAGATTATTAACACCCTGGGTCTATTTTAGCCCCAGGGTATAAATTGATATTTAATAAAATCGGTTGCACTTTGAGTATTTTTTCATAGAATGACTCATATGATTAACATTGCAATACAGTAAAAGATCTTTAGTTATAAAGAAAAACTATTACGCTAAAAAGTGGAGGGAACATATGGAGAATAATATTCAAAATCAATGCGTACCTTACAATTGTTTAAGTAATCCTGAGGAGATACTTTTAGATGGAGAAAGAATATCAACTGGTAATTCATCAATTGATATCTCTCTGTCACTTGTCCAGCTTCTGGTATCTAACTTTGTACCAGGGGGAGGATTTTTAGTTGGATTATTAGATTTTGTATGGGGAATAGTAGGCCCTTCTCCATGGGATGCATTTCTAGTGCAAATTGAACAATTAATTAATGAAAGAATAGCTGCATATGCTAGGTCTGCAGCAATTTCTAATTTAGAAGGATTAGGAAACAATTTCAATATATATGTGGAAGCATTTAAAGAATGGGAAGCAGATCCTGATAATCCAGTAACCAGGACTAGAGTAGTTGATCGCTTTCGTATACTTGATGGGCTACTTGAAAGGGACATCCCTTCATTTCGAATTGCTGGATTTGAAGTACCCCTTTTATCCGTTTATGCTCAAGCGGCCAATTTGCATCTAGCTATATTAAGAGATTCTTCAATTTTTGGAGCAAGATGGGGATTGACAACAATAAATGTCAATGAAAACTATAATAGGCTAATTAGGCATATTGATGAATATGCTAATCACTGTGCAGATACGTATAATCGGGGATTAAATAATTTACCAAAATCTACGTATCAAGATTGGATAACATATAATCGATTACGGAGAGACTTAACATTAACTGTATTAGATATCGCTGCTTTCTTTCCAAGCTATGACAATAGGAGATATCCAATTCAGTCAGTTGGTCAACTAACAAGGGAAATTTATACGGACCCATTAATTACTTTTAATCCACAGTTACAGTCTGTAGCTCAATTACCTACTTTTAACGTTATGGAAAGCAACGCAATTAGAACTCCTCATTTATTTGATGTATTGAATAATCTTACAATTTTTACAGATTGGTTTAGTGTTGGACGCAACTTTTATTGGGGAGGACATCGAGTAATATCTAACCGTATAGGAGGAGGTAACATAACATCTCCTATATATGGAAGAGAGGCGAATCAGGAGCCTCCAAGATCTTTTACTTTTAATGGGCCTGTTTTTAGGACTTTATCAAATCCTACTTTTAGACCTTTACAGCAACCTTGGCCAGCGCCACCATTTAATTTACGTGGTGTTGAAGGAGTAGAATTTTCTACACCTTTAAATAGCTTTACGTATCGAGGAAGAGGTACGGTTGATTCTTTAACTGAGTTACCGCCTGAGGATAATAGTGTGCCTCCTCGCGAAGGATATAGTCATCGTTTATGTCATGCAACTTTTGTTCAAAGATCTGGAACCCCATTTTTAACAACTGGTCCAGTATTTTCTTGGACGCATCGTAGTGCTACTGATCGAAATATAATCTACCCGGATGTAATTAACCAAATACCGTTAGTAAAAGCATTCAACCTTACTTCAGGTACCTCTGTAGTCAGAGGTCCAGGATTTACAGGAGGGGATATCATCCGAACTAACGTTAATGGTAGTGTACTAAGTATGAGTCTTAATTTTAGTAACACAACATTACAGCGGTATCGTGTGAGAGTTCGTTATGCTGCTTCTCAAACAATGGTCATGAGCGTAACTGTTGGAGGGAGTACTACTGGTAATCAAGGATTCCCTAGTACTATGAGTGCAAATGGGGCTTTGACATCTCAATCATTTAGATTCGCAGAATTTCCTGTAGGTATTAGTGCATCTGGCAGTCAAGGTGCATCAATAAGTATTAGTAATAATGTAGGTAGACAAATGTTTCACTTAGATAGAATTGAATTTCTCCCAGTTACTTCTACATTTGAGGAGGAATATGATTTAGAAAGAGCGCAAGAGGCGGTGAATGCCCTGTTTACTTCTACGAACCAACTAGGGCTAAAAACAGATGTAACGGATTATCATATTGATCAAGTATCAAATCTAGTTGAATGCTTATCGGATGAATTTTGTCTGGATGAAAAGCGAGAATTGTCTGAGAAAGTCAAACATGCGAAGCGACTCAGCGATGAGCGCAATTTACTCCAGGATCGAAATTTCAGATCCATTAATGGGCAACTAGACCGTGGCTGGAGAGGAAGTACGGATATTACCATCCAAGGTGGAGATGACGTATTCAAAGAGAATTACGTCACACTGCCGGGTACCTTTGATGAGTGCTATCCAACGTATCTATATCAAAAAATAGATGAATCGAAATTAAAATCCTATACACGTTACGAGTTAAGAGGGTATATCGAGGATAGTCAAGATTTAGAAATCTATTTGATTCGCTACAATGCAAAACACGAAATAGTAAATGTACCAGGTACAGGGAGTTTATGGCCTCTTTCTATAGAAAATTCAATTGGGCCTTGTGGAGAACCGAATCGCTGCGCGCCACACCTTGAATGGAATCCTAATCTAGATTGTTCCTGCAGGGACGGGGAAAAATGTGCCCATCATTCCCATCATTTCTCCTTGGACATTGATGTTGGATGTACAGACTTAAATGAGGACTTAGGTGTATGGGTGATCTTCAAGATTAAGACGCAAGATGGCCATGCAAGACTAGGAAATCTAGAGTTTCTCGAAGAGAAACCACTATTAGGGGAAGCACTAGCTCGTGTGAAAAGAGCGGAGAAGAAATGGAGAGACAAACGTGAAAAATTGGAATGGGAAACAAATATTGTTTATAAAGAGGCAAAAGAATCTGTAGATGCTTTATTTGTGAACTCTCAATATGATAGATTACAAGCGGATACGAATATCGCGATGATTCATGCGGCAGATAAACGCGTTCATAGAATTAGAGAAGCATACCTTCCAGAATTATCTGTAATTCCGGGTGTAAATGCGGGCATTTTCGAAGAATTAGAGGGACGCATTTTCACAGCCTACTCTCTATATGATGCGAGAAATGTCATTAAAAATGGCGATTTCAATAATGGTTTATTATGCTGGAACTTGAAAGGGCATGTAGATGTAGAAGAACAAAACAACCATCGTTCAGTCCTTGTTGTCCCGGAATGGGAAGCAGAGGTGTCCCAAGAAGTTCGTGTCTGTCCAGGTCGTGGCTATATCCTTCGTGTTACAGCGTACAAAGAGGGATATGGAGAGGGCTGCGTAACCATTCATGAGATCGAAGACAATACAGACGAACTGAAATTTAGCAACTGTGTTGAAGAGGAAGTATATCCAAACAACACGGTAACGTGTAATGATTATACTGCGACTCAAGAAGAATACGGGGGTGCGTACACTTCCCGTAATCATGGATATGGCAAATCTTATGAAAGTAATTCTTCCGTACAAGCTGATTATGCGTCAGTTTATGAAGAAAAAGCGGACACAGATGGACGAAGAGATAATCATTGCGAATCTAACAGAGGGTATGGGGATTACACGCCACTACCAGCTGGTTATGTAACAAAAGAATTAGAATACTTCCCAGAAACCGATAAGGTATGGGTTGAGATTGGAGAAACGGAAGGAACATTCATTGTGGATAGTGTGGAATTACTCCTTATGGAGGAATAAGGTATGTTTTAAAATGTAGCGTGTGCAAATAAAGAATGTTTACTGACCAGTATTAACAGATAAATAAGAAACTTCTATATAAATAAAAAACGGACATCAATCTTAAGAGAATGATGTCCGTTTTTTGTATGATTTGATTCAACGAGTGATATGTAAATATATTTTTTTGCGAAGTCTTTACATAACAAAAAAATTCGTATAGCAAAATTCTAAATTTAACCTTAAATATAGTTAGGGTGAAAATATGCCAAACTAATTTATTCCGAATGTTAATTCGAAA

SEQ ID NO: 1387 - protein, 1171 aa, Bacillus thuringiensis; identical to SEQ ID NO: 176

SEQ ID NO: 1388 - protein, 4231 aa, Bacillus thuringiensis
GTACCAAATTATAAGAACTTTGGTATTTCAATAAAAGAAAATGGAGGTATTTTATGGAGATAGTGAATAATCAGAATCAATGCGTGCCTTATAATTGTTTAAATAATCCTGAAAATGAGATATTAGATATTGAAAGGTCAAATAGTACTGTAGCAACAAACATCGCCTTGGAGATTAGTCGTCTGCTCGCTTCCGCAACTCCAATAGGGGGGATTTTATTAGGATTGTTTGATGCAATATGGGGGTCTATAGGCCCTTCACAATGGGATTTATTTTTAGAGCAAATTGAGCTATTGATTGACCAAAAAATAGAGGAATTCGCTAGAAACCAGGCAATTTCTAGATTAGAAGGGATAAGCAGTCTGTACGGAATTTATACAGAAGCTTTTAGAGAGTGGGAAGCAGATCCTACTAATCCAGCATTAAAAGAAGAGATGCGTACTCAATTTAATGACATGAACAGTATTCTTGTAACAGCTATTCCTCTTTTTTCAGTTCAAAATTATCAAGTCCCATTTTTATCAGTATATGTTCAAGCTGCAAATTTACATTTATCGGTTTTGAGAGATGTTTCAGTGTTTGGGCAGGCTTGGGGATTTGATATAGCAACAATAAATAGTCGTTATAATGATCTGACTAGACTTATTCCTATATATACAGATTATGCTGTACGCTGGTACAATACGGGATTAGATCGCTTACCACGAACTGGTGGGCTGCGAAACTGGGCAAGATTTAATCAGTTTAGAAGAGAGTTAACAATATCAGTATTAGATATTATTTCTTTTTTCAGAAATTACGATTCTAGATTATATCCAATTCCAACAAGCTCCCAATTAACGCGGGAAGTATATACAGATCCGGTAATTAATATAACTGACTATAGAGTTGGCCCCAGCTTCGAGAATATTGAGAACTCAGCCATTAGAAGCCCCCACCTTATGGACTTCTTAAATAATTTGACCATTGATACGGATTTGATTAGAGGTGTTCACTATTGGGCAGGGCATCGTGTAACTTCTCATTTTACAGGTAGTTCTCAAGTGATAACAACCCCTCAATATGGGATAACCGCAAATGCGGAACCAAGACGAACTATTGCTCCTAGTACTTTTCCAGGTCTTAACCTATTTTATAGAACATTATCAAATCCTTTCTTCCGAAGATCAGAAAATATTACTCCTACCTTAGGGATAAATGTAGTACAGGGAGTAGGGTTCATTCAACCAAATAATGCTGAAGTTCTATATAGAAGTAGGGGGACAGTAGATTCTCTTAATGAGTTACCAATTGATGGTGAGAATTCATTAGTTGGATATAGTCATCGATTAAGTCATGTTACACTAACCAGGTCGTTATATAATACTAATATAACTAGCCTGCCAACATTTGTTTGGACACATCACAGTGCTACTAATACAAATACAATTAATCCAGATATTATTACACAAATACCTTTAGTGAAAGGATTTAGACTTGGTGGTGGCACCTCTGTCATTAAAGGACCAGGATTTACAGGAGGGGATATCCTTCGAAGAAATACCATTGGTGAGTTTGTGTCTTTACAAGTCAATATTAACTCACCAATTACCCAAAGATACCGTTTAAGATTTCGTTATGCTTCCAGTAGGGATGCACGAATTACTGTAGCGATAGGAGGACAAATTAGAGTAGATATGACCCTTGAAAAAACCATGGAAATTGGGGAGAGCTTAACATCTAGAACATTTAGCTATACCAATTTTAGTAATCCTTTTTCATTTAGGGCTAATCCAGATATAATTAGAATAGCTGAAGAACTTCCTATTCGTGGTGGTGAGCTTTATATAGATAAAATTGAACTTATTCTAGCAGATGCAACATTTGAAGAAGAATATGATTTGGAAAGAGCACAGAAGGCGGTGAATGCCCTGTTTACTTCTACAAATCAACTAGGGCTAAAAACAGATGTGACGGATTATCATATTGATCAAGTTTCCAATTTAGTTGAGTGTTTATCGGATGAATTTTGTCTGGATGAAAAGAGAGAATTATCCGAGAAAGTCAAACATGCGAAGCGACTCAGTGATGAACGGAATTTACTTCAAGATTCAAACTTCAGAGGGATCAATAGGCAACCAGACCGTGGCTGGAGAGGAAGCACGGATATTACTATCCAAGGTGGAGATGACGTATTCAAAGAGAATTACGTCACATTACCGGGTACCTTTGATGAGTGCTATCCAACGTATTTATATCAAAAAATAGATGAGTCGAAGTTAAAAGCTTATACCCGCTATGAATTAAGAGGGTATATCGAGGATAGTCAAGACTTAGAAATCTATTTAATTCGCTACAATGCAAAACACGAGACAGTAAACGTGCCAGGTACGGGTTCCTTATGGCCGCTTTCAGCCCAAAGTCCAATCGGAAAGTGTGGAGAACCGAATCGATGCGCGCCACACCTTGAATGGAATCCTAATCTAGATTGCTCCTGCAGAGACGGGGAAAAATGTGCCCATCATTCCCATCATTTCTCCTTGGACATTGATGTTGGATGTACAGACTTAAATGAGGACTTAGGTGTATGGGTGATATTCAAGATTAAGACACAAGATGGCTATGCAAGACTAGGAAATCTAGAGTTTCTCGAAGAGAAACCACTATTAGGGGAAGCACTAGCTCGTGTGAAAAGAGCGGAGAAAAAATGGAGAGACAAATGCGAAAAATTGGAATGGGAAACAAATATTGTTTATAAAGAGGCAAAAGAATCTGTAGATGCTTTATTTGTAAACTCTCAATATGATAGATTACAAGCGGATACGAATATCGCGATGATTCATGCGGCAGATAAACGCGTTCATAGCATTCGAGAAGCGTATCTGCCAGAGCTGTCTGTGATTCCGGGTGTCAATGCGGCTATTTTTGAAGAATTAGAAGGGCGTATTTTCACTGCATTCTCCCTATATGATGCGAGAAATGTCATTAAAAATGGCGATTTCAATAATGGCTTATCATGCTGGAACGTGAAAGGGCATGTAGATGTAGAAGAACAGAACAACCATCGTTCGGTCCTTGTTGTTCCAGAATGGGAAGCAGAAGTGTCACAAGAAGTTCGTGTTTGTCCGGGTCGTGGCTATATCCTTCGTGTTACAGCGTACAAAGAGGGATATGGAGAGGGCTGTGTAACGATTCATGAGATCGAAGACAATACAGACGAACTGAAATTCAGCAACTGTGTAGAAGAGGAAGTATATCCAAACAACACGGTAACGTGTAATAATTATACTGCGACTCAAGAAGAACATGAGGGTACGTACACTTCCCGTAATCGAGGATATGACGAAGCCTATGAAAGCAATTCTTCTGTACATGCGTCAGTCTATGAAGAAAAATCGTATACAGATAGACGAAGAGAGAATCCTTGTGAATCTAACAGAGGATATGGGGATTACACACCACTACCAGCTGGCTATGTGACAAAAGAATTAGAGTACTTCCCAGAAACCGATAAGGTATGGATTGAGATCGGAGAAACGGAAGGAACATTCATCGTGGACAGCGTGGAATTACTTCTTATGGAGGAATAATATATGCTTTAAAATGTAAGGTGTGCAAATAAAGAATGATTACTGACTTGTATTGACAGATAAATAAGGAAATTTTTATATGAATAAAAAACGGGCATCACTCTTAAAAGAATGATGTCCGTTTTTTGTATGATTTAACGAGTGATATTTAAATGTTTTTTTGCGAAGGCTTTACTTAACAAAAAAATTCGTATAGCAAAATTCTAAATTTAACCTTAAATATAGTTAGGGTGAAAATATGCCAAACTAATTTATTCCTAATGTTAATTCGAAACAAATCATAAACAAAAATACAGGTATAAAAAAATTTGTGTAAGACATTTTTTTATACCTGTACTATGAGTGTATTTCCCCTGTTAAAATATTTAATCAAAACTATCATCTTTTTATTATCTTTAGGAATATATGGAGAGTAAAATGAGATTTCATCTAAATAAAAAATAGTAACTACTCAGCCACCTTTTGGTGTCTTTTTTTAATTTTACTAGTTTCATATGCCTCCCATTTGTAAATACTGAGTATATCAAACAGGGGGTGAATAAGATGGTCGATCGAAAACTCATTTTAGATGCATATAAAAAAGGACCTGAAGCTGTTATTTCTTTATTTGAAGAAACATTCTCTAAGTTAGAAAAACGAATTCAAGAACTAGAACACGCTTC

SEQ ID NO: 1389 - protein, 1168 aa, Bacillus thuringiensis
MKNNIQNQCVPYNCLSNPEVEILSEERSTGRLPLDISLSLTRFLLSEFVPGVGVAFGLFDLIWGFITPSEWSLFLLQIEQLIEQRIETLERNRAITTLRGLADSYEVYLEALREWEENPNNAQLREDVRIRFANTDDALITAINNFTLTSFEIPLLSVYVQAANLHLSLLRDAVSFGQGWGLDIATVNNHYNRLINLIHRYTEHCLDTYNQGLENLRGTNTRQWSRFNQFRRELTLTVLDIVALFPNYDARAYPIQTSSQLTREIYTSSVIEDSPVSANIPNGFNRAEFGVRPPHLMDFMNSLFVTAETVRSQTVWGGHLVSSRNTAGNPINFPIYGVFNPGGAIWIADEDPRPFYRTLSDPVFVRGGFGDPHYVLGLRGVGFQQTGTNHTRTFRNSGTIDSLDEIPPQDNSGAPWNDYSHVLNHVTFVRWPGEIAGSDSWRAPMFSWTHRSADRTNIINPNIITQIPAVKAHNLHSGSTVVRGPGFTGGDLLRRTNTGTFADIRVNITGPLSQRYRVRIRYASTTDLQFFTRINGTSVNQGNFQRTMNRGDNLESGNFRTAGFSTPFSFSNAQSTFTLGTQAFSNQEVYIDRIEFVPAEVTFEAESDLERAQKAVNALFTSTSQLGLKTNVTGYHIDQVSNLVACLSDEFCLDEKRELSEKVKHAKRLSDKRNLLQDPNFRGINRQPDHGWRGSTDITIQGGDDVFKENYVTLPGTFDECYPTYLYQKIDESKLKAYTRYQLRGYIEDSQDLEIYLIRYNSKHEIVNVPGTGSLWPLSVENQIGPCGEPNRCAPHLEWNPDLHCSCRDGEKCVHHSHHFSLDIDVGCTDLNEDLGVWLIFKIKTQDGHARLGNLEFLEEEPLLGEALGRVKRAEKKWRDKREKLQLETNIVYKEAKESVDALFVNSQYDRLQADTNIAMIHAADKRVHRIREAYLPELSVIPGVNAAIFEELEGRIFTAYSLYDARNVIKNGNFNNGLLCWNVKGHVDVEEQNNHRSVLVVPEWEAEVSQEVRVCPGRGYILRVTAYKEGYGEGCVTIHEVDNNTDELKFSNCEKEQVYPGNTVACNDYNKNHGANACSSRNRGYDESYESNSSIPADYAPVYEEEAYTDGQRGNPCEFNRGHTPLPAGYVTAELEYFPETDTVWVEIGETEGTFIVDSVELLLMEE

SEQ ID NO: 1390 - protein, 719 aa, Bacillus thuringiensis
MKLKNPDKHQSFSSNAKVDKISTDSLKNETDIELQNINHEDCLKMSEYENVEPFVSASTIQTGIGIAGKILGTLGVPFAGQVASLYSFILGELWPKGKNQWEIFMEHVEEIINQKISTYARNKALTDLKGLGDALAVYHDSLESWVGNRNNTRARSVVKSQYIALELMFVQKLPSFAVSGEEVPLLPIYAQAANLHLLLLRDASIFGKEWGLSSSEISTFYNRQVERAGDYSDHCVKWYSTGLNNLRGTNAESWVRYNQFRRDMTLMVLDLVALFPSYDTQIYPIKTTAQLTREVYTDAIGTVHPHPSFTSTTWYNNNAPSFSAIEAAVVRNPHLLDFLEQVTIYSLLSRWSNTQYMNMWGGHKLEFRTIGGTLNISTQGSTNTSINPVTLPFTSRDVYRTESLAGLNLFSTQPDNGVPRVDFHWKFVTHPIASDNFYYPGYAGIGTQLQDSENELPPEATGQPSYESYSHRLSHIGLISASHVKALVYSWTHRSADRTNTIEPNSITQIPLVKAFNLSSGAAVVRGPGFTGGDILRRTNTGTFGDIRVNINPPFAQRYRVRIRYASTTDLQFHTSINGKAINQGNFSATMNRGEDLDYKTFRTVGFTTPFSFLDVQSTFTIGAWNFSSGNEVYIDRIEFVPVEVTYEAEYDFEKAQEKVTALFTSTNPRGLKTDVKDYHIDQVSNLVESLSDEFYLDEKRELFEIVKYAKQLHIERNM

SEQ ID NO: 1391 - protein, 722 aa, Bacillus thuringiensis
MKLKNQDKHQSFSSNAKVDKISTDSLKNETDIELQNINHEDCLKMSEYENVEPFVSASTIQTGIGIAGKILGTLGVPFAGQVASLYSFILGELWPKGKNQWEIFMEHVEEIINQKISTYARNKALTDLKGLGDALAVYHDSLESWVGNRNNTRARSVVKSQYIALELMFVQKLPSFAVSGEEVPLLPIYAQAANLHLLLLRDASIFGKEWGLSSSEISTFYNRQVERAGDYPDHCVKWYSTGLNNLRGTNAESWVRYNQFRRDMTLMVLDLVALLPSYDTQMYPIKTTAQLTREVYTDAIGTVHPHPSFTSTTWYNNNAPSFSAIEAAVVRNPHLLDFLEQVTIYSLLSRWSNTQYMNMWGGHKLEFRTIGGTLNISTQGSTNTSINPVTLPFTSRDVYRTESLAGLNLFLTQPVNGVPRVDFHWKFVTHPIASDNFYYPGYAGIGTQLQDSENELPPEATGQPNYESYSHRLSHIGLISASHVKALVYSWTHRSADRTNTIEPNSITQIPLVKAFNLSSGAAVVRGPGFTGGDILRRTNTGTFGDIRVNINPPFAQRYRVRIRYASTTDLQFHTSINGKAINQGNFSATMNRGEDLDYKTFRTVGFTTPFSFLDVQSTFTIGAWNFSSGNEVYIDRIEFVPVEVTYEAEYDFEKAQEKVTALFTSTNPRGLKTDVKDYHIDQVSNLVESLSDEFYLDEKRELFEIVKYAKQLHIERNMVDA

SEQ ID NO: 1392 - protein, 717 aa, Bacillus thuringiensis
MKLKNQDKHQSFSSNAKVDKISTDSLKNETDIELQNINHEDCLKMSEYENVEPFVSASTIQTGIGIAGKILGTLGVPFAGQVASLYSFILGEPWPKGKNQWEIFMEHVEEIINQKISTYARNKALTDLKGLGDALAVYHDSLESWVGNRNNTRARSVVKSQYIALELMFVQRLPSFAVSGEEVPLLPIYAQAANLHLLLLRDASIFGKEWRLSSSEISTFYNRQVERAGDYSDHCVKWYSTGLNNLRGTNAESWVRYNQFRRDMTLMVLDLVALFPSYDTQMYPIKTTAQLTREVYTDAIGTVHPHPSFTSTTWYNNNAPSFSAIEAAVVRSPHLLDFLEQVTIYSLLSRWSNTQYMNMWGGHKLEFRTIGGTLNISTQGSTNTSINPVTLPFTSRDVYRTESLAGLNLFLTQPVNGVPRVDFHWKFVTHPIASDNFYYPGYAGIGTQLQDSENELPPEATGQPNYESYSHRLSHIGLISASHVKALVYSWTHRSADRTNTIEPNSITQIPLVKAFNLSSGAAVVRGPGFTGGDILRRTNTGTFGYIRVNINPPFAQRYRVRIRYASTTDLQFHTSINGKAINQGNFSATMNRGEDLDYKTFRTVGFTTPFSFLDVQSTFTIGAWNFSSGNEVYIDRIEFVPVEVTYEAEYDSEKAQEKVTALFTSTNPRGLKTDVKDYHIDQVSNLVESLSDEFYLDEKRELFEIVKYAKQLHIER

SEQ ID NO: 1393 - protein, 722 aa, Bacillus thuringiensis
MKLKNQDKHQSFSSNAKVDKISTDSLKNETDIELQNINHEDCLKMSEYENVEPFVSASTIQTGIGIAGKILGTLGVPFAGQVASLYSFILGELWPKGKSQWEIFMEHVEEIINQKISTYARNKALTDLKGLGDALAVYHDSLESWVGNRNNTRARSVVKSQYIALELMFVQKLPSFAVSGEEVPLLPIYAQAANLHLLLLRDASIFGKEWGLSSSEISTFYNHQVERAGDYSDHCVKWYSTGLNNLRGTNAESWVRYNQFRRDMTLMVLDLVALFPSYDIQMYPIKTTAQLTREVYTDAIGTVHPHPSFTSTTWYNNNAPSFSAIEAAVVRNPHLLDFLEQVTIYSLLSRWSNTQYMNMWGGHKLEFRTIGGTLNISTQGSTNTSINPVTLPFTSRDVYRTESLAGLNLFLTQPVNGVPRVDFHWKFVTHPIASDNFYYPGYAGIGTQLQDSENELPPEATGQPNYESYSHRLSHIGLISASHVKALVYSWTHRSADRTNTIEPNSITQIPLVKAFNLSSGAAVVRGPGFTGGDILRRTNTGTFGDIRVNINPPFAQRYRVRIRYASTTDLQFHTSINGKAINQGNFSATMNRGEDLDYKTFRTVGFTTPFSFLDVQSTFTIGAWNFSSGNEVYIDRIEFVPVEVTYEAEYDFEKAQEKVTALFTSTNPRGLKTDVKDYHIDQVSNLVESLSDEFYLDEKRELFEIVKYAKQLHIERNMVDA

SEQ ID NO: 1394 - protein, 147 aa, Bacillus thuringiensis
MKLKNPDKHQSLSSNAKVDKIATDSLKNETDIELKNMNNEDYLRMSEHESIDPFVSASTIQTGIGIAGKILGTLGVPFAGQIASLYSFILGELWPKGKSQWEIFMEHVEEIINQKILTYARNKALSDLRGLGDALAVYHESLESWVE

SEQ ID NO: 1395 - protein, 719 aa, Bacillus thuringiensis
MKLKNPDKHQTLSSNAKVDKIATDSLKNETDIELKNMNNEDYLRMSEHESIDPFVSASTIQTGIGIAGKILGTLGVPFPGQIASLYSFILGELWPKGKSQWEIFMEHVEAIINRKISTYARNKALTDLKGLGDALAVYHESLESWVGNRNNTRARSVVKNQYIALELMFVQKLPSFAVSGEEVPLLPIYAQAANLHLLLLRDASIFEKNGGLSASEISTFYNRQVERTRDYSYHCVKWNNTGLNNLRATNGQSWVRYNQFRKDIELMVLDLVRVFPSYDTLVYPIKTTSQLTREVYTDAIGTVDPNQALRSTTWYNNNAPSFSAIEAAVIRSPHLLDFLEKVTIYSLLSRWSNTQYMNMWGGHRLESRPIGGALNTSTQGSTNTSINPVTLQFTSRDFYRTESWAGLNLFLTQPVIGVPRVDFHWKFPTLPIASDNFYYLGYAGVGTQLQDSENELPPETTGQPNYESYSHRLSHIGLISASHVKALVYSWTHRSADRTNTIEPNSITQIPLVKAFNLSSGAAVVRGPGFTGGHILRRTKSGTFGHIRVNINPPFAQRYRVRMSYASTTDLQFHTSINGKAINQGNFSATMNRGEDLDYKTFRTVGFTTPFSFSDVQSTFTIGAWNFSSGNEVYIGRIEFVPVEVTYEAEYDFEKAQEKVTALFTSTNPRGLKTDVKDYHIDQVSNLVESLSDELYLDEKRELFEIVKYAKQIHIERNM

SEQ ID NO: 1396 - protein, 381 aa, Bacillus thuringiensis; identical to SEQ ID NO: 225

SEQ ID NO: 1397 - protein, 150 aa, Bacillus thuringiensis
MEINNQKQCIPYNCLSNPEEVLLDGERILPDIDPLEVSLSLLQFLLNNFVPGGGFISGLVDKIWGALRPSEWDLFLAQIERLIDQRIEATVRAKAITELEGLGRNYQIYAEAFKEWESDPDNEAAKSRVIDRFRILDGLIEANIPSFRII

SEQ ID NO: 1398 - protein, 1170 aa, Bacillus thuringiensis
MEINNQNQCIPYNCLSNPEEVLLDGERILPDIDPLEVSMSLLQFLLNNFVPGGGFISGLFDKIWGALRPSDWELFLAQIEQLIDQRIEATVRAKAIAELEGLGRSFQLYVEAFKEWEETPDNTAARSRVTERFRIIDAQIEANIPSFRIPGFEVPLLSVYAQAANLHLALLRDSVIFGERWGLTTTNVNDIYNRQVKRIHEYSDHCVDTYKTELERLGFTSRAQWKIYNQFRRELTLTVLDIVAVFPNYDGKLYPIQTKSELTREIYTSPVSEYYYGAINNYNQNGIQTERQIRQPHLMDFFNTMTMYTSYNRREYYWSGLEMTAYFTGFAGPQVSFPLAGTRGDAAPPFNVRSVNDGIYRILSAPFYSAPFLGTSVLGSRGEEFMFALNNISPPPSARYRNPGTVDSLVSIPPQDNSVPPHRGSSHRLSHVTMRNSSPIFHWTHRSATTTNRINSDVITQIPMVKAYNLHAGATVVRGPGFTGGDILRRTSNGMVVTLRVDASAVRNQRYRIRFRYAATSNFYFVVRRGNLGVNGREIMKTMSTGEELKSASFVLGEFITPFNFFENQVPLQIEIQSLSPGGEVYLDKIEFIPADTTFEAEYDLERAQKAVNALFTSTNQRGLKTDVTDYHIDQVSNLVECLSDEFCLDEKRELSEKVKHAKRLSDERNLLQDPNFTSINGQLDRGWRGSTDITIQGGNDVFKENYVTLPGTFDECYPTYLYQKIDESKLKAYTRYELRGYIEDSQDLEVYLIRYNAKHETLNVPGTDSLRTLSVESQNGRCGELNRCMPHIKWNPDVDCSCRDGEKCAHHSHHFSLDIDVGCTDLQEDLGVWVVFKIKTQEGYARLGNLEFIEEKPLVGEALSRVKRAEKKWRDKREKLELETKRVYTEAKEAVDALFVDSQYDRLQADTNIGMIHAADKLVHRICETYLPELPFIPGINAIIFEELENRISTAFFLYEARNVINNGDFNNGLTCWNVKGHVDVQQSHHRSVLVIPEWEAEVSQKVRVCPGRGYILRVTAYKEGYGEGCVTIHEIEDNTDELKFRNCEEEGDYSNDTGTCNDYPASQGAAGCADVCNSRNVGYKDAYETNTSASVNYKPTYEEETYTDVREDNHCEYDRGYVNYPPLPAGYVTKELEYFPETDTVWIEIGETEGKFIVDSVELLLMEE

SEQ ID NO: 1399 - protein, 1168 aa, Bacillus thuringiensis; identical to SEQ ID NO: 227

SEQ ID NO: 1400 - protein, 725 aa, Bacillus thuringiensis
  MISC_FEATURE (55)..(55): Xaa is Ala, Arg, Asn, Asp, Asx, Cys, Glu, Gln, Glx, Gly, His, Ile, Leu, Lys, Met, Phe, Pro, Ser, Thr, Trp, Tyr, or Val.
  MISC_FEATURE (76)..(76): Xaa is Ala, Arg, Asn, Asp, Asx, Cys, Glu, Gln, Glx, Gly, His, Ile, Leu, Lys, Met, Phe, Pro, Ser, Thr, Trp, Tyr, or Val.
  MISC_FEATURE (477)..(477): Xaa is Ala, Arg, Asn, Asp, Asx, Cys, Glu, Gln, Glx, Gly, His, Ile, Leu, Lys, Met, Phe, Pro, Ser, Thr, Trp, Tyr, or Val.
  MISC_FEATURE (600)..(600): Xaa is Ala, Arg, Asn, Asp, Asx, Cys, Glu, Gln, Glx, Gly, His, Ile, Leu, Lys, Met, Phe, Pro, Ser, Thr, Trp, Tyr, or Val.
  MISC_FEATURE (604)..(604): Xaa is Ala, Arg, Asn, Asp, Asx, Cys, Glu, Gln, Glx, Gly, His, Ile, Leu, Lys, Met, Phe, Pro, Ser, Thr, Trp, Tyr, or Val.
  MISC_FEATURE (619)..(619): Xaa is Ala, Arg, Asn, Asp, Asx, Cys, Glu, Gln, Glx, Gly, His, Ile, Leu, Lys, Met, Phe, Pro, Ser, Thr, Trp, Tyr, or Val.
  MISC_FEATURE (623)..(623): Xaa is Ala, Arg, Asn, Asp, Asx, Cys, Glu, Gln, Glx, Gly, His, Ile, Leu, Lys, Met, Phe, Pro, Ser, Thr, Trp, Tyr, or Val.
  misc_feature (624)..(624): Xaa can be any naturally occurring amino acid
  MISC_FEATURE (636)..(636): Xaa is Ala, Arg, Asn, Asp, Asx, Cys, Glu, Gln, Glx, Gly, His, Ile, Leu, Lys, Met, Phe, Pro, Ser, Thr, Trp, Tyr, or Val.
  MISC_FEATURE (637)..(637): Xaa is Ala, Arg, Asn, Asp, Asx, Cys, Glu, Gln, Glx, Gly, His, Ile, Leu, Lys, Met, Phe, Pro, Ser, Thr, Trp, Tyr, or Val.
  MISC_FEATURE (647)..(647): Xaa is Ala, Arg, Asn, Asp, Asx, Cys, Glu, Gln, Glx, Gly, His, Ile, Leu, Lys, Met, Phe, Pro, Ser, Thr, Trp, Tyr, or Val.
  MISC_FEATURE (653)..(653): Xaa is Ala, Arg, Asn, Asp, Asx, Cys, Glu, Gln, Glx, Gly, His, Ile, Leu, Lys, Met, Phe, Pro, Ser, Thr, Trp, Tyr, or Val.
  MISC_FEATURE (712)..(712): Xaa is Ala, Arg, Asn, Asp, Asx, Cys, Glu, Gln, Glx, Gly, His, Ile, Leu, Lys, Met, Phe, Pro, Ser, Thr, Trp, Tyr, or Val.
MCGFTPTRSREQVAEISLGLTRFLLENLFPGSTFGFGLIDIIWGIFGPDQWSMFXEQIEQLIDQRIETVERNRANXNINWVINSYDVYIEALKEWENNPDNSASQERVRNRFRTTDDALITGIPLLAIPNFEIATLSVYVQAANLHLSLLRDAVFFGERWGLTQINVDDLYRRLTNNIRTNSDHCARWYNEGLDNISGLSRSINFQREVTISVLDIVALFPNYDIRTYPISTTSQLTREIFTSPIVVPNDFSVAYEGVRRAPHLFEFLEKLVIYTGDRSGIRHWAGHEITSRRTDSYHGIIRYPLYGTAANAESPYTLALQPSGSIYRTLSEPIFSQTGGLSPHRRRVVEGVEFSIVNNNVNPSSFVYRRKGSLDSFTELPPEDESVPPYIGYSHQLCHVGFGRTNVIFEPSNFARVPVFSWTHRSATPTNTIDPDRITQIPSVKASSLRNSTVVSGPGFTGGDIVRMGAVHQIYAXDLSMNVRPSVALSRYLIRLRYACRGSSNIVIHGPSIRFVSLPSTMSNDEPLTYQSFRYASITTPITRPIYNMFNLSISRISGVQNLFIDRIEFIPVDANFEAERDLERAQKAVNALFTSTNQXGLKXDVTDYHIDQVSNLVXCLSDXFCLDEKRELSEKXKHAKRLSDEXNLLQDXNFTGINRQVDRGWRGSTDITIQGGNDVFKENYVTLPGTFDECYPTYLYQKIDESKLKPXTRYELRGYIEDSQ

SEQ ID NO: 1401 - protein, 1170 aa, Bacillus thuringiensis; identical to SEQ ID NO: 1398

SEQ ID NO: 1402 - protein, 1167 aa, Bacillus thuringiensis
MTNPTILYPSYHNVLAHPIRLDSFFDPFVETFKDLKGAWEEFGKTGYMDPLKQHLQIAWDTSQNGTVDYLALTKASISLIGLIPGADAVVPFINMFVDFIFPKLFGRGSQQNAQAQFFELIIEKVKELVDEDFRNFTLNNLLNYLDGMQTALSHFQNDVQIAICQGEQPGLMLDQTPTACTPTTDHLISVRESFKDARTTIETALPHFKNPMLSTNDNTPDFNSDTVLLTLPMYTTGATLNLILHQGYIQFAERWKSVNYDESFINQTKVDLQRRIQDYSTTVSTTFEKFKPTLNPSNKESVNKYNRYVRSMTLQSLDIAATWPTLDNVNYPSNVDIQLDQTRLVFSDVAGPWEGNDNITSNIIDVLTPINTGIGFQESSDLRKFTYPRIELQSMQFHGQYVNSKSVEHCYSDGLKLNYKNKTITAGVSNIDESNQNNKHNYGPVINSPITDINVNSQNSQYLDLNSVMVNGGQKVTGCSPLSSNGNSNNAALPNQKINVIYSVQSNDKPEKHADTYRKWGYMSSHIPYDLVPENVIGDIDPDTKQPSLLLKGFPAEKGYGDSIAYVSEPLNGANAVKLTSYQVLQMEVTNQTTQKYRIRIRYATGGDTAASIWFHIIGPSGNDLTNEGHNFSSVSSRNKMFVQGNNGKYVLNILTDSIELPSGQQTILIQNTNSQDLFLDRIEFISLPSTSTPTSTNFVEPESLEKIINQVNQLFSSSSQTELAHTVSDYKIDQVVLKVNALSDDVFGVEKKALRKLVNQAKQLSKARNVLVGGNFEKGHEWALSREATMVANHELFKGDHLLLPPPTLYPSYAYQKIDESKLKSNTRYTVSGFIAQSEHLEVVVSRYGKEVHDMLDIPYEEALPISSDESPNCCKPAACQCSSCDGSQSDSHFFSYSIDVGSLQSDVNLGIEFGLRIAKPNGFAKISNLEIKEDRPLTEKEIKKVQRKEQKWKKAFNQEQAEVATTLQPTLDQINALYQNEDWNGSVHPASDYQHLSAVVVPTLPKQRHWFMEGREGEHVVLTQQFQQALDRAFQQIEEQNLIHNGNLANGLTDWTVTGDAQLTIFDEDPVLELAHWDASISQTIEIMDFEGRHRIQTACTWKRQRNSYRSTWRKRLETMTFNTTSFTTQEQTFYFEGDTVDVHVQSENNTFLIDSVELIEIIEE

SEQ ID NO: 1403 - protein, 1167 aa, Bacillus thuringiensis
MTNPTILYPSYHNVLAHPIRLDSFFDPFVETFKDLKGAWEEFGKTGYMDPLKQHLQIAWDTSQNGTVDYLALTKASISLIGLIPGADAVVPFINMFVDFIFPKLFGRGSQQNAQAQFFELIIEKVKELVDEDFRNFTLNNLLNYLDGMQTALSHFQNDVQIAICQGEQPGLMLDQTPTACTPTTDHLISVRESFKDARTTIETALPHFKNPMLSTNDNTPDFNSDTVLLTLPMYTTAATLNLILHQGYIQFAERWKSVNYDESFINQTKVDLQRRIQDYSTTVSTTFEKFKPTLNPSNKESVNKYNRYVRSMTLQSLDIAATWPTLDNVNYPSNVDIQLDQTRLVFSDVAGPWEGNDNITSNIIDVLTPINTGIGFQESSDLRKFTYPRIELQSMQFHGQYVNSKSVEHCYSDGLKLNYKNKTITAGVSNIDESNQNNKHNYGPVINSPITDINVNSQNSQYLDLNSVMVNGGQKVAGCSPLSSNGNSNNAALPNQKINVIYSVQSNDKPEKHADTYRKWGYMSSHIPYDLVPENVIGDIDPDTKQPSLLLKGFPAEKGYGDSIAYVSEPLNGANAVKLTSYQVLKMEVTNQTTQKYRIRIRYATGGDTAASIWFHIIGPSGNDLTNEGHNFSSVSSRNKMFVQGNNGKYVLNILTDSIELPSGQQTILIQNTNSQDLFLDRIEFISLPSTSTPTSTNFVEPESLEKIINQVNQLFSSSSQTELAHTVSDYKIDQVVLKVNALSDDVFGVEKKALRKLVNQAKQLSKARNVLVGGNFEKGHEWALSREATMVANHELFKGDHLLLPPPTLYPSYAYQKIDESKLKSNTRYTVSGFIAQSEHLEVVVSRYGKEVHDMLDIPYEEALPISSDESPNCCKPAACQCSSCDGSQSDSHFFSYSIDVGSLQSDVNLGIEFGLRIAKPNGFAKISNLEIKEDRPLTEKEIKKVQRKEQKWKKAFNQEQAEVATTLQPTLDQINALYQNEDWNGSVHPHVTYQHLSAVVVPTLPKQRHWFMEDREGEHVVLTQQFQQALDRAFQQIEEQNLIHNGNFANGLTDWTVTGDAQLTIFDEDPVLELAHWDASISQTIEIMDFEEDTEYKLRVRGKGKGTVTVQHGEEELETMTFNTTSFTTQEQTFYFEGDTVDVHVQSENNTFLIDSVELIEIIEE

SEQ ID NO: 1404 - protein, 2172 aa, Bacillus thuringiensis
ATGAAAGAACAAAATCTAAATAAATATGATGAAATAACTGTACAAGCAGCAAGCGATTATATCGACATTCGTCCGATTTTTCAAACAAATGGATCTGCTACATTTAATTCTAATACCAATATTACAACTTTAACACAAGCTATAAATAGTCAAGCAGGAGCAATTGCAGGAAAGACTGCTCTAGATATGAGACATGACTTTACTTTTAGAGCAGATATTTTTCTTGGAACTAAAAGTAACGGAGCAGACGGTATTGCAATCGCATTTCATAGAGGATCAATTGGGTTTGTTGGAACAAAAGGCGGAGGACTTGGAATATTAGGTGCACCTAAAGGGATAGGGTTTGAATTAGACACATATGCGAATGCACCTGAGGACGAAGTAGGCGATTCGTTTGGGCATGGGGCAATGAAAGGATCATTCCCTAGTTTCCCAAATGGATATCCCCATGCTGGCTTTGTAAGTACTGATAAAAATAGTAGATGGTTATCAGCTCTAGCTCAGATGCAGCGAATCGCTGCTCCAAACGGGCGTTGGAGACGTCTGGAGATTCGTTGGGATGCTCGTAATAAAGAGTTAACTGCAAATCTTCAGGATTTAACTTTTAATGACATAACTGTTGGAGAGAAGCCACGTACTCCAAGAACTGCAACTTGGAGGTTAGTAAATCCTGCATTTGAACTTGATCAGAAGTATACTTTTGTTATTGGTTCGGCGACGGGTGCATCTAATAACCTACATCAGATTGGGATTATAGAATTTGATGCATACTTTACTAAACCGACAATAGAAGCGAATAATGTAAATGTCCCAGTGGGAGCAACATTTAATCCAAAAACATATCCAGGAATAAATTTAAGAGCAACAGATGAGATAGATGGGGATTTGACATCGAAGATTATTGTGAAAGCAAACAATGTTAATACGTCGAAAACGGGTGTGTATTATGTGACGTATTATGTAGAGAATAGTTATGGGGAAAGTGATGAAAAAACAATCGAAGTAACTGTGTTTTCAAACCCTACAATTATTGCAAGTGATGTTGAAATTGAAAAAGGGGAATCTTTTAACCCACTAACTGATTCAAGAGTAGGTCTTTCTGCACAGGATTCATTAGGCAATGATATTACCCAAAATGTAAAGGTAAAATCGAGTAATGTGGATACTTCAAAGCCAGGGGAATATGAAGTTGTATTTGAAGTGACAGATAGCTTTGGTGGAAAAGCAGAAAAAGATTTCAAGGTTACAGTTTTAGGACAGCCAAGTATAGAAGCGAATAATGTTGAATTAGAAATAGATGATTCATTGGATCCATTAACAGATGCAAAAGTAGGTCTCCGTGCAAAGGATTCATTAGGTAATGATATTACGAAAGACATAAAAGTAAAGTTCAATAACGTAGATACTTCAAATTCAGGAAAGTATGAAGTTATATTTGAAGTGACGGACCGTTTTGGAAAAAAAGCAGAAAAAAGTATTGAAGTCCTTGTTCTAGGAGAACCAAGCATTGAAGCAAATGATGTTGAGGTTAATAAAGGTGAAACGTTTGAACCATTAACAGATTCAAGAGTTGGCCTCCGTGCAAAAGACTCATTAGGTAATGATATTACGAAAGATGTGAAAATAAAATCAAGTAATGTGGATACTTCAAAACCAGGTGAATATGAAGTTGTATTTGAAGTGACAGATCGTTTTGGTAAATATGTAGAAAAAACAATTGGAGTTATAGTGCCAGTAATTGATGATGAATGGGAAGATGGAAATGTGAATGGTTGGAAATTCTATGCTGGGCAAGATATTAAACTGTTGAAGGATCCTGATAAAGCCTATAAAGGCGATTATGTATTCTATGATTCTAGACACGTTGCTATTTCTAAAACAATTCCACTAACGGATTTGCAAATAAATACAAACTATGAAATTACAGTGTATGCTAAAGCAGAAAGCGGCGATCATCACTTAAAAGTGACGTATAAGAAAGACCCGGCAGGTCCAGAAGAGCCGCCAGTTTTCAATAGACTGATTAGCACAGGCACATTGGTAGAAAAAGATTATAGAGAATTAAAAGGGACGTTCCGCGTAACAGAATTAAACAAAGCACCATTGATAATCGTAGAGAATTTTGGAGCTGGATATATAGGTGGAATTAGAATTGTGAAAATATCGTAATAA

SEQ ID NO: 1405 - protein, 633 aa, Bacillus thuringiensis
MNSVLNSRRTTICDAYNVVAHDPFSFEHKSLDTIQKEWMEWKRTDHSLYVAPVVGTVSSFLLKKVGSLIGKRILSELWGIIFPSGSTNLMQDILRETEQFLNQRLNTDTLARVNAELIGLQANIREFNQQVDNFLNPTQNPVPLSITSSVNTMQQLFLNRLPQFQIQGYQLLLLPLFAQAANMHLSFIRDVILNADEWGISAATLRTYRDYLRNYTRDYSNYCINTYQTAFRGLNTRLHDMLEFRTYMFLNVFEYVSIWSLFKYQSLMVSSGANLYASGSGPQQTQSFTAQNWPFLYSLFQVNSNYILSGISGTRLSITFPNIGGLPGSTTTHSLNSARVNYSGGVSSGLIGATNLNHNFNCSTVLPPLSTPFVRSWLDSGTDREGVATSTNWQTESFQTTLSLRCGAFSARGNSNYFPDYFIRNISGVPLVIRNEDLTRPLHYNQIRNIESPSGTPGGARAYLVSVHNRKNNIYAANENGTMIHLAPEDYTGFTISPIHATQVNNQTRTFISEKFGNQGDSLRFEQSNTTARYTLRGNGNSYNLYLRVSSIGNSTIRVTINGRVYTVSNVNTTTNNDGVNDNGARFSDINIGNIVASDNTNVTLDINVTLNSGTPFDLMNIMFVPTNLSPLY

SEQ ID NO: 1406 - protein, 633 aa, Bacillus thuringiensis; identical to SEQ ID NO: 266

SEQ ID NO: 1407 - protein, 633 aa, Bacillus thuringiensis serovar israelensis
MNTVLNSGRTTICDAYNVAAHDPFSFQHKSLDTVQKEWTEWKKNNHSLYLDPIVGTVASFLLKKVGSLVGKRILSELRNLIFPSGSTNLMQDILRETEKFLNQRLNTDTLARVNAELTGLQANVEEFNRQVDNFLNPNRNAVPLSITSSVNTMQQLFLNRLPQFQMQGYQLLLLPLFAQAANLHLSFIRDVILNADEWGISAATLRTYRDYLKNYTRDYSNYCINTYQSAFKGLNTRLHDMLEFRTYMFLNVFEYVSIWSLFKYQSLLVSSGANLYASGSGPQQTQSFTSQDWPFLYSLFQVNSNYVLNGFSGARLSNTFPNIVGLPGSTTTHALLAARVNYSGGISSGDIGASPFNQNFNCSTFLPPLLTPFVRSWLDSGSDREGVATVTNWQTESFETTLGLRSGAFTARGNSNYFPDYFIRNISGVPLVVRNEDLRRPLHYNEIRNIASPSGTPGGARAYMVSVHNRKNNIHAVHENGSMIHLAPNDYTGFTISPIHATQVNNQTRTFISEKFGNQGDSLRFEQNNTTARYTLRGNGNSYNLYLRVSSIGNSTIRVTINGRVYTATNVNTTTNNDGVNDNGARFSDINIGNVVASSNSDVPLDINVTLNSGTQFDLMNIMLVPTNLPPLY

SEQ ID NO: 1408 - protein, 633 aa, Bacillus thuringiensis
MNSVLNSGRTTICDAYNVAAHDPFSFQHKSLDTVQKEWTEWKKNNHSLYLDPIVGTVASFLLKKVGSLVGKRILSELRNLIFPSGSTNLMQDILRETEKFLNQRLNTDTLARVNAELTGLQANVEEFNRQVDNFLNPNRNAVPLSITSSVNTMQQLFLNRLPQFQMQGYQLLLLPLFAQAASLHLSFIRDVILNADEWGISAATLRTYRDYLKNYTRDYSNYCINTYQSAFKGLNTRLHDMLEFRTYMFLNVFEYVSIWSLFKYQSLLVSSGANLYASGSGPQQTQSFTSQDWPFLYSLFQVNSNYVLNGFSGARLSNTFPNIVGLPGSTTTHALLAARVNYSGGISSGDIGASPFNQNFNCSTFLPPLLTPFVRSWLDSGSDREGVATVTNWQTESFETTLGLRSGAFTARGNSNYFPDYFIRNISGVPLVVRNEDLRRPLHYNEIRNIASPSGTPGGARAYMVSVHNRKNNIHAVHENGSMIHLAPNDYTGFTISPIHATQVNNQTRTFISEKFGNQGDSLRFEQNNTTARYTLRGNGNSYNLYLRVSSIGNSTIRVTINGRVYTATNVNTTTNNDGVNDNGARFSDINIGNVVASSNSDVPLDINVTLNSGTQFDLMNIMLVPTNLPPLY

SEQ ID NO: 1409 - protein, 633 aa, Bacillus thuringiensis
MNSVLNIGRTTICDAYNVAAHDPFSFQHKSLDTVQKEWTEWKKNNHSLYLDPIVGTVASFLLKKVGSLVGKRILSELRNLIFPSGSTNLMQDILRETEKFLNQRLNTDTLARVNAELTGLQANVEEFNRQVDNFLNPNRNAVPLSITSSVNTMQQLFLNRLPQFQMQGYQLLLLPLFAQAANLHLSFIRDVILNADEWGISAATLRTYRDYLKNYTRDYSNYCINTYQSAFKGLNTRLHDMLEFRTYMFLNVFEYVSIWSLFKYQSLLVSPGANLYASGSGPQQTQSFTSQDWPFLYSLFQVNSNYVLNGFSGARLSNTFPNIVGLPGSTTTHALLAARVNYSGGISSGDIGASPFNQNFNCSTFLPPLLTPFVRSWLDSGSDREGVATVTNWQTESFETTLGLRSGAFTARGNSNYFPDYFIRNISGVPLVVRNEDLRRPLHYNEIRNIASPSGTPGGARAYMVSVHNRKNNIHAVHENGSMIHLAPNDYTGFTISPIHATQVNNQTRTFISEKFGNQGDSLRFEQNNTTARYTLRGNGNSYNLYLRVSSIGNSTIRVTINGRVYTATNVNTTTNNDGVNDNGARFSDINIGNVVASSNSDVPLDINVTLNSGTQFDLMNIMLVPTNIPPLY

SEQ ID NO: 1410 - protein, 633 aa, Bacillus thuringiensis
MNSVLNTGRTTICDAYNVAAHDPFSFQHKSLDTVQKEWTEWKKNNHSLYLDPIVGTVASFLLKKVGSLVGKRILSELRNLIFPSGSTNLMQDILRETEKFLNQRLNTDTLARVNAELTGLQANVEEFNRQVDNFLNPNRNAVPLSITSSVNTMQQLFLNRLPQFQMQGYQLLLLPLFAQAANLHLSFIRDVILNADEWGISAATLRTYRDYLKNYTRDYSNYCINTYQSAFKGLNTRLHDMLEFRTYMFLNVFEYVSIWSLFKYQSLLVSSGANLYASGSGPQQTQSFTSQDWPFLYSLFQVNSNYVLNGFSGARLSNTFPNIVGLPGSTTTHALLAARVNYSGGISSGDIGASPFNQNFNCSTFLPPLLTPFVRSWLDSGSDREGVATVTNWQTESFETTLGLRSGAFTARGNSNYFPDYFIRNISGVPLVVRNEDLRRPLHYNEIRNIASPSGTPGGARAYMVSVHNRKNNIHAVHENGSMIHLAPNDYTGFTISPIHATQVNNQTRTFISEKFGNQGDSLRFEQNNTTARYTLRGNGNSYNLYLRVSSIGNSTIRVTINGRVYTATNVNTTTNNDGVNDNGARFSDINIGNVVASSNSDVPLDINVTLNSGTQFDLMNIMLVPTNISPLY

SEQ ID NO: 1411 - protein, 142 aa, Bacillus thuringiensis
MNNVLNSRRTTICDAYNVAAHDPFSFQHKSLDTVQKEWTEWKKNNHSLYLDPIVGTVASFLLKKVGSLVGKRILSELRNLIFPSGSTNLMQDILRETEKFLNQRLNTDTLARVNAELTGLQANVEEFNRQVDNFLNPNRNAV

SEQ ID NO: 1412 - protein, 632 aa, Bacillus thuringiensis
MNTVLNSGRTTICDAYNVAAHDPFSFQHKSLDTVQKEWTEWKKNNHSLYLDPIVGTVASFLLKKVGSLVGKRILSELRNLIFPSGSTNLMQDILRETEKFLNQRLNTDTLARVNAELTGLQANVEEFNRQVDNFLNPNRNAVPLSITSSVNTMQQLFLNRLPQFQMQGYQLLLLPLFAQAANLHLSFIRDVILNADEWGISAATLRTYRDYLKNYTRDYSNYCINTYQSAFKGLNTRLHDMLEFRTYMFLNVFEYVSIWSLFKYQSLLVSSGANLYASGSGPQQTQSFTSQDWPFLYSLFQVNSNYVLNGFSGARLSNTFPNIVGLPGSTTTHALLAARVNYSGGISSGDIGASPFNQNFNCSTFLPPLLTPFVRSWLDSGSDREGVATVTNWQTESFETTLGLRSGAFTARGNSNYFPDYFIRNISGVPLVVRNEDLRRPLHYNEIRNIASPSGTPGGARAYMVSVHNRKNNIHAVHENGSMIHLAPNDYTGFTISPIHATQVNNQTRTFISEKFGNQGDSLRFEQNNTTARYTLRGNGNSYNLYLRVSSIGNSTIRVTINGRVYTATNVNTTTNNDGVNDNGARFSDINIGNVVASSNSDVPLDINVTLNSGTQFDLMNIMLVPTNLPPL

SEQ ID NO: 1413 - protein, 142 aa, Bacillus thuringiensis
MNTVLNSGRTTICDAYNVAAHDPFSFQHKSLDTVQKEWTEWKKNNHSLYLDPIVGTVASFLLKKVGSLVGKRILSELRNLIFPSGSTNLMQDILRETEKFLNQRLNTDTLARVNAELTGLQANVEEFNRQVDNFLNPNRNAV

SEQ ID NO: 1414 - protein, 633 aa, Bacillus thuringiensis
MNSVLNNGRTTICDAYNVAAHDPFSFQHKSLDTVQKEWTEWKKNNHSLYLDPIVGTVASFLLKKVGSLVGKRILSELRNLIFPSGSTNLMQDILRETEKFLNQRLNTDTLARVNAELTGLQANVEEFNRQVDNFLNPNRNAVPLSITSSVNTMQQLFLNRLPQSQMQGYQLLLLPLFAQAANLHLSFIRDVILNADEWGISAATLRTYRDYLKNYTRDYSNYCINTYQSAFKGLNTRLHDMLEFRTYMFLNVFEYVSIWSLFKYQSLLVSSGANLYASGSGPQQTQSFTSQDWPFLYSLFQVNSNYVLNGFSGARLSNTFPNIVGLPGSTTTHALLAARVNYSGGISSGDIGASPFNQNFNCSTFLPPLLTPFVRSWLDSGSDREGVATVTNWQTESFETTLGLRSGAFTARGNSNYFPDYFIRNISGVPLVVRNEDLRRPLHYNEIRNIASPSGTPGGARAYMVSVHNRKNNIHAVHENGSMIHLAPNDYTGFTISPIHATQVNNQTRTFISEKFGNQGDSLRFEQNNTTARYTLRGNGNSYNLYLRVSSIGNSTIRVTINGRVYTATNVNTTTNNDGVNDNGARFSDINIGNVVASSNSDVPLDINVTLNSGTQFDLMNIMLVPTNIPPLY

SEQ ID NO: 1415 - protein, 1902 aa, Bacillus thuringiensis
ATGAATAGTGTATTGAATAGCGGAAGAACTACTATTTGTGATGCGTATAATGTAGCGGCTCATGATCCATTTAGTTTTCAACACAAATCATTAGATACCGTACAAAAGGAATGGACGGAGTGGAAAAAAAATAATCATAGTTTATACCTAGATCCTATTGTTGGAACTGTGGCTAGTTTTCTGTTAAAGAAAGTGGGGAGTCTTGTTGGAAAAAGGATACTAAGTGAGTTACGGAATTTAATATTTCCTAGTGGTAGTACAAATCTAATGCAAGATATTTTAAGAGAGACAGAAAAATTCCTGAATCAAAGACTTAATACAGACACTGTTGCCCGTGTAAATGCGGAATTGACAGGGCTGCAAGCAAATGTAGAAGAGTTTAATCGACAAGTAGATAATTTTTTGAACCCTAACCGAAACGCTGTTCCTTTATCAATAACTTCTTCAGTTAATACAATGCAACAATTATTTCTAAATAGATTACCCCAGTTCCAGATGCAAGGATACCAACTGTTATTATTACCTTTATTTGCACAGGCAGCCAATTTACATCTTTCTTTTATTAGAGATGTTATTCTAAATGCAGATGAATGGGGAATTTCAGCAGCAACATTACGTACGTATCGAGATTACTTGAAAAATTATACAAGAGATTACTCTAACTATTGTATAAATACGTATCAAAGTGCGTTTAAAGGTTTAAACACTCGTTTACACGATATGTTAGAATTTAGAACATATATGTTTTTAAATGTATTTGAATATGTATCTATCTGGTCGTTGTTTAAATATCAAAGTCTTCTAGTATCTTCCGGTGCTAATTTATATGCAAGTGGTAGTGGACCACAGCAGACCCAATCATTTACTTCACAAGACTGGCCATTTTTATATTCTCTTTTCCAAGTTAATTCAAATTATGTGTTAAATGGATTTAGTGGTGCTAGGCTTTCTAATACCTTCCCTAATATAGTTGGTTTACCTGGTTCTACTACAACTCACGCATTGCTTGCTGCAAGGGTTAATTACAGTGGAGGAATTTCGTCTGGTGATATAGGTGCATCTCCGTTTAATCAAAATTTTAATTGTAGCACATTTCTCCCCCCATTGTTAACGCCATTTGTTAGGAGTTGGCTAGATTCAGGTTCAGATCGGGAGGGCGTTGCCACCGTTACAAATTGGCAAACAGAATCCTTTGAGACAACTTTAGGGTTAAGGAGTGGTGCTTTTACAGCTCGCGGTATTTCAAACTATTTCCCAGATTATTTTATTCGTAATATTTCTGGAGTTCCTTTAGTTGTTAGAAATGAAGATTTAAGAAGACCGTTACACTATAATGAAATAAGAAATATAGCAAGTCCTTCAGGAACACCTGGTGGAGCACGAGCTTATATGGTATCTGTGCATAACAGAAAAAATAATACCCATGCCGTTCATGAAAATGGTTCTATGATTCATTTAGCGCCAAATGACTATACAGGATTTACTATTTCGCCGATACATGCAACTCAAGTGAATAATCAAACACGAACATTTATTTCTGAAAAATTTGGAAATCAAGGTGATTCCTTAAGGTTTGAACAAAATAACACGACAGCTCGTTATACGCTTAGAGGGAATGGAAATAGTTACAATCTTTATTTAAGAGTTTCTTCAATAGGAAATTCCACTATTCGAGTTACTATAAACGGTAGGGTATATACTGCTACAAATGTTAATACTACTACAAATAACGATGGAGTTAATGATAACGGAGCTCGTTTTTCAGATATTAATATCGGTAATGTAGTAGCAAGTAGTAATTCTGATGTACCATTAGATATAAATGTAACATTAAACTCCGGTACTCAATTTGATCTTATGAATATTATGCTTGTACCAACTAATATTTCACCACTTTATTAA

SEQ ID NO: 1416 - protein, 633 aa, Bacillus thuringiensis
MNNVLNSGRNITCHAHNVVAHDPFSFEHKSLNTIEKEWKEWKRTDHSLYVAPIVGTVGSFLLKKVGSLVGKRILSELQNLIFPSGSIDLMQEILRATEQFINQRLNADTLGRVNAELAGLQANVAEFNRQVDNFLNPNQNPVPLAIIDSVNTLQQLFLSRLPQFQIQGYQLLLLPLFAQAANLHLSFIRDVILNADEWGISAATVRTYRDHLRNFTRDYSNYCINTYQTAFRGLNTRLHDMLEFRTYMFLNVFEYVSIWSLFKYQSLMVSSGANLYASGSGPQQTQSFTAQNWPFLYSLFQVNSNYILSGISGTRLSITFPNIGGLPGSTTTHSLNSARVNYSGGVSSGLIGATNLNHNFNCSTVLPPLSTPFVRSWLDSGTDREGVATSTNWQTESFQTTLSLRCGAFSARGNSNYFPDYFIRNISGVPLVIRNEDLTRPLHYNQIRNIESPSGTPGGARAYLVSVHNRKNNIYAANEYGTMIHLAPEDYTGFTISPIHATQVNNQTRTFISEKFGNQGDSLRFEQSNTTARYTLRGNGNSYNLYLRASSIGNSTIRVTINGRAYTVSNVNTTTNNDGVNDNGARFSDINIGNIVASDNTNVTLDINVTLNSGTPFDLMNIMFVPTNLPPLY

SEQ ID NO: 1417 - protein, 1152 aa, Bacillus thuringiensis
ATGTTAGATACTAATAAAGTTTATGAAATAAGTAATCATGCTAATGGACTATATGCAGCAACTTATTTAAGTTTAGATGATTCAGGTGTTAGTTTAATGAATAAAAATGATGATGATATTGATGATTATAACTTAAAATGGTTTTTATTTCCTATTGATGATGATCAATATATTATTACAAGCTATGCAGCAAATAATTGTAAAGTTTGGAATGTTAATAATGATAAAATAAATGTTTCGACTTATTCTTCAACAAATTCAATACAAAAATGGCAAATAAAAGCTAATGGTTCTTCATATGTAATACAAAGTGATAATGGAAAAGTCTTAACAGCAGGAACCGGTCAAGCTCTTGGATTGATACGTTTAACTGATGAATCCTCAAATAATCCCAATCAACAATGGAATTTAACTTCTGTACAAACAATTCAACTTCCACAAAAACCTATAATAGATACAAAATTAAAAGATTATCCCAAATATTCACCAACTGGAAATATAGATAATGGAACATCTCCTCAATTAATGGGATGGACATTAGTACCTTGTATTATGGTAAATGATCCAAATATAGATAAAAATACTCAAATTAAAACTACTCCATATTATATTTTAAAAAAATATCAATATTGGCAACGAGCAGTAGGAAGTAATGTAGCTTTACGTCCACATGAAAAAAAATCATATACTTATGAATGGGGAACAGAAATAGATCAAAAAACAACAATCATAAATACATTAGGATTTCAAATCAATATAGATTCAGGAATGAAATTTGATATACCAGAAGTAGGTGGAGGTACAGATGAAATAAAAACACAACTAAATGAAGAATTAAAAATAGAATATAGTCGTGAAACTAAAATAATGGAAAAATATCAAGAACAATCTGAAATAGATAATCCAACTGATCAACCAATGAATTCTATAGGATTTCTTACTATTACTTCTTTAGAATTATATAGATATAATGGCTCAGAAATTCGTATAATGCAAATTCAAACCTCAGATAATGATACTTATAATGTTACTTCTTATCCAGATCATCAACAAGCTTTATTACTTCTTACAAATCATTCATATGAAGAAGTAGAAGAAATAACAAATATTCCTAAAAGTACACTAAAAAAATTAAAAAAATATTATTTTTAA

SEQ ID NO: 1418 - protein, 1291 aa, Bacillus thuringiensis
GAAAGATCCAATTTTTTCACTTAATACTCTTCAGGAGTATGGACCAACTTTTTTGAGTATAGAAAACTCTATTCGAAAACCTCATTTATTTGATTATTTACAGGGGATTGAATTTCATACGCGTCTTCAACCTGGTTACTTTGGGAAAGATTCTTTCAATTATTGGTCTGGTAATTATGTAGAAACTAGACCTAGTATAGGATCTAGTAAGACAATTACTTCCCCATTTTATGGAGATAAATCTACTGAACCTGTACAAAAGCTAAGCTTTGATGGACAAAAAGTTTATCGAACTATAGCTAATACAGACGTAGCGGCTTGGCCGAATGGTAAGGTATATTTAGGTGTTACGAAAGTTGATTTTAGTCAATATGATGATCAAAAAAATGAAACTAGTACACAAACATATGATTCAAAAAGAAACAATGGCCATGTAAGTGCACAGGATTCTATTGACCAATTACCGCCAGAAACAACAGATGAACCACTTGAAAAAGCATATAGTCATCAGCTTAATTACGCGGAATGTTTCTTAATGCAGGACCGTCGTGGAACAATTCCATTTTTTACTTGGACACATAGAAGTGTAGACTTTTTTAATACAATTGATGCTGAAAAGATTACTCAACTTCCAGTAGTGAAAGCATATGCCTTGTCTTCAGGTGCTTCCATTATTGAAGGTCCAGGATTCACAGGAGGAAATTTACTATTCCTAAAAGAATCTAGTAATTCAATTGCTAAATTTAAAGTTACATTAAATTCAGCAGCCTTGTTACAACGATATCGTGTAAGAATACGCTATGCTTCTACCACTAACTTACGACTTTTTGTGCAAAATTCAAACAATGATTTTCTTGTCATCTACATTAATAAAACTATGAATAAAGATGATGATTTAACATATCAAACATTTGATCTCGCAACTACTAATTCTAATATGGGGTTCTCGGGTGATAAGAATGAACTTATAATAGGAGCAGAATCTTTCGTTTCTAATGAAAAAATCTATATAGATAAGATAGAATTTATCCCAGTACAATTGTAAGGAGATTTTAAAATGTTGGGTGATGGTCAAAATGAAAGAATAGGAAGGTGAATTTTGATGGTTAGGAAAGATTCTTTTAACAAAAGCAACATGGAAAAGTATACAGTACAAATATTAGAAATAAAATTTATTAACACAGGGGAAGATGGTAAACCAGAACCGTATGGTTATATTGACTTTTATTATCAACCTGCTCCTAACCTGAGAGAAGAAAAAGTAAGAATTTGGGAAGAGGAAAATAGTAGC

SEQ ID NO: 1419 - protein, 362 aa, Bacillus thuringiensis; identical to SEQ ID NO: 425

SEQ ID NO: 1420 - protein, 609 aa, Bacillus thuringiensis
MGTWWPTDSASDTWGEMIGFAQELVGTALSEDLKIRTNQQIDSIRIALQAYYSSLEDWLNANKPLSGPLLNQVTEEFGNALRKSRDSIAYFKSDDSNVYTIILLPAYAQVANFHLALIHEGLKYATEWNLPRLQTFGYEEDLKHYTISYVNHCEYWYQKGLDILYPRNVIGMTQWMKRNFYRLNMTINVLDIISLFSLYDSKKYPNFFEDIYNAQKELISKFQLTRIVTTEPTLHQHKYLNDSSKKICQNESSCDPIDLDEYLTLPLMFQNWLRNINFQYLAPVISVGDEALYPFFVATQNINEYMNAEGNMIIGRQQGLWNFQFIIVHLFHLVYKKMTIFMVKWLSAYPLIDEDILNGVRTPYILQKIEFYNLNKSINSKQIRPISAGTTKSPLIDIYYGLPDVNGYNLDEPQFNFNAASHYFNSIQTCYYKENTSKNHYDIYQSYVFHWEHASVKRKDEVVSDRITIFPAIKSNPILSRGIQIISHQGHTGGNVIYFTPQSELHFKINFVSNRQKYKIRLRYVAFNPVVIQYHGSNSYASLSSITLPRTSSNQNVRDLRYEEFGYSDFEINMSSAGGLEDIKIISNNEFILDRIEFIPDTLFNYLSN

SEQ ID NO: 1421 - protein, 837 aa, Bacillus thuringiensis
MKIYDIYPHYNVLSDAALITSYASDFRDSLKGLEEIWSKYATEGNRSAMTSYVSNIMQLYQTDSINYQALVKSAITLNLALTPLAPVSPFINMVIGFVRPFLFGSSKEVSMFDQIMDAVKKEMEHSFEQFTLNNLNDTINGLKTDLYDFTRLIDASTGVLQLPYESGEGCKPCKLGENSPCAPCYNDMIAINSKFQALTSSFNNALPHFKDPLANVIEKPNPGWNQEYITMCLPLYTLVATLELLTYQGYIQFAEKWRIPADSETSPITTTQIANMKANLRQRIQEHSNDIYTTFIKYLPKVNENATKGELNDYIRYHRVITLQCLDFVATWPFLDSRYYQSSGAATINFTRMTYLDIVGPVEDFYNDSKLDPSRDSGKLILSIKDINGKNDTNKISDVIAPLSLFYDNLELKSLKFNVYNSSWHCYINGYQGIYNSLSNDVSVSTNTNNLAKDLYLDFPLLNKLNMRSYAVGKASVDDSMVYVDDDSDVPSGNGHAIYGGCNGFYTGGPHSNNTLNYDNQIIQAIYEVTASNPNVYTYYYNADKTGYLATLSPIETTLSPIIGTDFQVINTVPAEQVISTSGTKFVEYITGSAVLELKPNQTAKYSILNQGLFQYKVRARVATTDSGSLSITMNNKTINLNIINTKNYTDPTTAFTNLKIQGKNGSYMVFPLSDAEHTTFDNVFNPNYGTVTMEVTNNSNTNIIIDRFEFIPYAPSKGTLLDTIPETIRTGGDSSILWKSTTGIGGQQVDLNIVIKDPSGIDVTTNYLLQYGSSYEFPLFSGQHSYPAVLNNEFTELGIDNCYGGNLGCNMNMPLKTIVPEGYTLTFSGNIYNNLK

SEQ ID NO: 1422 - protein, 1220 aa, Bacillus thuringiensis
MAILNELYPSVPYNVLAYTPPSFLPDAGTQATPADLTAYEQLLKNLEKGINAGTYSKAIADVLKGIFIDDTINYQTYVNIGLSLITLAVPEIGIFTPFIGLFFAALNKHDAPPPPNAKDIFEAMKPAIQEMIDRTLTADEQTFLNGEISGLQNLAARYQSTMDDIQSHGGFNKVDSGLIKKFTDEVLSLNSFYTDRLPVFITDNTADRTLLGLPYYAILASMHLMLLRDIITKGPTWDSKINFTPDAIDSFKTDIKNNIKLYSKTIYDVFQKGLASYGTPSDLESFAKKKKYIEIMTTHCLDFARLFPTFDPDLYPTGSGDISLQKTRRILSPFIPIRTADGLTLNNTSIDTSNWPNYENGNGAFPNPKERILKQFKLYPSWRAGQYGGLLQPYLWAIEVQDSVETRLYGQLPAVDPQAGPNYVSIDSSNPIIQINMDTWKTPPQGASGWNTNLMRGSVSGLSFLQRDGTRLSAGMGGGFADTIYSLPATHYLSYLYGTPYQTSDNYSGHVGALVGVSTPQEATLPNIIGQPDEQGNVSTMGFPFEKASYGGTVVKEWLNGANAMKLSPGQSIGIPITNVTKHNYQVRCRYASNSDNPVFFNVDTGGANPIFQQINFASTVDSNMGVKEENGVYVVKSIKTVEIPAGSFYVHVTNQGSSDLFLDRIEFVPKIQFQFCDNNNLHCDCNNPVDTDCTFCCVCTSLTDCDCNNPRGIDCTLCCQVENQLPSFVTLTDLRNITSQVNGLFAPGTQNRLAQNISDHDIEEVVLKVDALSDEIFGTNKKALRKLVNQAKRLSRARNLLIGGSFENWDAWYKGRNVVTVSDHELFKSDHVLLPPPGLSPSYIFQKVEESKLKANTRYTVSGFIAHATDLEIVVSRYGQEIKKVVQVPYGEAFPLTSSGPVCCIPHSTSNGTLGNPHFFSYSIDVGALDVDTNPGIEFGLRIVNPTGMARVSNLEIREDRPLAANEIRQVQRVARNWRTEYEKERAEVTSLIQPVINRINGLYENENWNGSIRSDISYQNIDAIVLPTLPTLRHWFMSDRFSEQGDIMAKFQGALNRAYAQLEQSTLLHNGHFTKDAANWTIEGDAHQITLEDGRRVLRLPDWSSSVSQMIEIENFNPDKEYNLVFHGQGEGTVTLEHGEETKYIETHTHHFANFTTSQRQGLTFESNKVTVTISSEDGEFLVDNIALVEAPLPTDDQNSEGNTAFSTNSDTSMNNNQ

SEQ ID NO: 1423 - protein, 3504 aa, Bacillus thuringiensis
ATGAGTCCAAATAATCAAAATGAATATGAAATTCTAGATGCTTCATCATCTACTTCTGTATCCGATAATTCTGTTAGATACCCTTTAGCAAACGATCAAACGACCACATTACAAAACATGAACTATAAAGATTATCTGAGAATGTCTGAGGGAGAGAATCCTGAATTATTTGGAAATCCGGAGACGTTTATTAGTTCATCTACGGTTCAAACTGGAATTGGCATTGTTGGTCAAGTACTGGGGGCTTTAGGGGTTCCATTTGCTGGACAGATAGCTAGTTTTTATAGTTTCATTGTCGGTCAATTATGGCCATCAAGTACCGTGAGTGTATGGGAAATGATTATGAAACAAGTGGAAGATCTAATTGATCAAAAAATAACAGATTCTGTAAGGAAAACAGCGCTTGCAGGACTACAAGGATTAGGAGATGGCTTAGACGTATATCAGAAATCACTTAAGAATTGGCTGGAAAATCGTAATGATACAAGAGCTAGAAGTGTTGTGGTGACCCAATATATAGCTTTAGAGCTTGATTTTGTTGCTAAAATCCCATCTTTTGCAATATCTGGACAGGAAGTACCATTATTATCAGTGTATGCACAAGCAGCGAATTTACATTTGCTATTATTACGAGATGCTTCCATTTTTGGAGCAGAGTGGGGATTCACACCAGGAGAAATTTCCACATTTTATGATCGTCAGGTGACACGTACCGCCCAATACTCGGATTATTGTGTAAAGTGGTATAACACTGGCTTAGATAAATTAAAAGGTACGAATGCTGCAAGTTGGCTGAAGTATCACCAATTCCGAAGAGAAATGACATTACTGGTATTAGATTTAGTAGCGTTATTTCCAAACTATGACACACGTACGTATCCAATCGAAACAACGGCCCAACTTACACGGGAAGTGTATACAGATCCAATAGTATTTAACAGAGAAACAAGTGGTGGATTTTGTAGGCGTTGGTCACTTAACAGTGATATTTCTTTTTCAGAAGTCGAAAGCGCTGTAATTCGTTCACCACACCTATTTGATATACTCAGTGAAATAGAATTTTATACAACAAGAGCGGGGCTTCCCTTGAATAATACGGAATACCTTGAATATTGGGTAGGACATTCTATAAAATATAAAAATACGAATGCCTCATCAGCATTAGAACGTAATTACGGTACGATTACTTCTAACAAAATCAAGTATTATGATTTAGCAAATAAGGATATCTTTCAGGTTCGATCATTAGGGGCGGATTTAGCTAATTACTACGCACAGGTATATGGAGTTCCGTACGCTAGTTTTACACTGCTTGACAAGAATACAGGATCAGGATCAGTTGGAGGTTTTACGTACTCAAAACCACATACAACTATGCAAGTATGTACACAAAATTACAATACGATTGATGAAATCCCTCCAGAGAATGAGCCACTTAGTAGAGGGTATAGCCATAGATTATCTCATATCACCTCTTATTCTTTTTCTAAGAATGCTAGTAGTCCTGCTAGATATGGCAATCTCCCTGTATTTGCTTGGACACATCGGAGTGCGGATGTTACAAATACAGTTTATTCAGATAAAATTACTCAGATACCAGTTGTAAAGGCACATACTTTAGTTTCAGGTACTACTGTTATTAAAGGTCCTGGATTTACAGGAGGCAATATCCTTAAAAGAACAAGTAGTGGTCCGTTAGCTTATACTAGTGTCTCTGTAAAATCACCATTATCACAAAGATATCGTGCAAGAATACGTTATGCTTCTACTACTAACTTACGACTTTTTGTAACAATTTCTGGAACTCGCATTTACTCTATAAATGTTAATAAAACCATGAATAAAGGGGATGATTTAACATTTAATACATTTGACTTAGCAACTATTGGTACTGCTTTCACATTTTCAAATTACTCGGATAGCTTAACGGTAGGTGCAGATTCTTTTGCTTCAGGAGGAGAAGTTTATGTAGATAAGTTCGAACTTATTCCGGTAAATGCAACATTTGAAGCAGAAGAAGACCTAGATGTGGCAAAGAAAGCAGTAAATGGCTTGTTTACGAGTAAAAAAGATGCCTTACAGACAAGTGTAACGGATTATCAAGTGAATCAAGCGGCAAACTTAGTAGAATGCCTATCCGATGAGTTATACCCAAATGAAAAACGAATGTTATGGGATGCAGTGAAAGAGGCGAAACGACTTGTTCAGGCACGTAACTTACTCCAAGATACAGGCTTTAATAGGATTAATGGAGAAAACGGATGGACGGGAAGTACGGGAATCGAGGTTGCGGAAGGAGATGTTCTGTTTAAAGATCGTTCGCTTCGTTTGACAAGTGCGAGAGAGATTGATACAGAAACATATCCAACGTATCTCTATCAACAAATAGATGAATCACTTTTAAAACCATATACAAGATATAAACTAAAAGGTTTTATAGGAAGTAGTCAAGATTTAGAGATTAAATTAATACGTCATCGGGCAAATCAAATCGTCAAAAATGTACCAGATAATCTCTTGCCAGATGTACTCCCTGTCAATTCTTGTGGTGGGATCGATCGCTGCAGTGAGCAACAGTATGTAGACGCGAATTTAGCACTCGAAAACAATGGAGAAAATGGAAATATGTCTTCTGATTCCCATGCATTTTCTTTCCATATTGATACAGGTGAAATAGATTTGAATGAAAATACAGGAATTTGGGTCGTATTTAAAATTCCGACAACAAATGGATACGCAACACTAGGAAATCTTGAATTGGTAGAAGAGGGGCCATTGTCAGGGGAAACATTAGAACGAGCACAACAACAAGAACAACAATGGCAAGACAAAATGGCAAGAAAACGTGGGGCATCAGAAAAAGCATATTATGCAGCAAAGCAAGCCATTGATCGTTTATTCGCAGATTATCAAGACCAAAAACTTAATTCTGGTGTAGAAATGTCAGATATGTTGGCAGCCCAAAACCTTGTACAGTCCATTCCTTACGTATATAATGATGCGTTACCAGAAATCCCTGGAATGAACTATACGAGTTTTACAGAGTTAACAAATAGACTCCAACAAGCATGGAATTTGTATGATCTTCGAAATGCTATACCAAATGGAGATTTTCGAAATGGATTAAGTGATTGGAATGCAACATCAGATGTGAATGTGCAACAACTAAGCGATACATCTGTCCTTGTCATTCCAAACTGGAATTCTCAAGTGTCACAACAATTTACAGTTCAACCGAATTATAGATATGTGTTACGTGTCACAGCGAGAAAAGAGGGAGTAGGAGACGGATATGTGATCATCCGTGATGGTGCGAATCAGACAGAAACACTCACATTTAATATATGTGATGATGATACAGGTGTTTTATCTGCTGATCAAACTAGCTATATCACAAAAACAGTGGAATTCACTCCATCTACAGAGCAAGTTTGGATTGACATGAGTGAGACCGAAGGTGTATTCAACATAGAAAGTGTAGAACTCGTGTTAGAAGAAGAGTAA

SEQ ID NO: 1424 - protein, 144 aa, Bacillus thuringiensis
MEGGNNQGFINIEGRLSLEQVLAVSAGVASYILSNLGPFGVFFSYIIGAFWPTAPSDTRVWEAFMELIEARIDQKIQESTRKDAIARLQGLGAASEVYQESLESWLENQNDARAMSVVRQQFVAFELDFVTAMPFFERSGDEIL

SEQ ID NO: 1425 - protein, 1154 aa, Bacillus thuringiensis
MNRNNQNEYEIIDGTNCGCSSDEVVKYPLTDDPNAGLQNMNYKEYLQTYDGDYTGSLINPNLSINTRDVLQTGINIVGRVLGFLGVPFAGQLVTFYTFLLNQLWPTNNNAVWEAFMAQIEELIDQRISEQVVRNALDALTGIHDYYNEYLAALEEWLERPNGARANLAFQRFENLHQLFVSQMPSFGSGPGSERDAVALLTVYAQAANLHLLLLKDAEIYGARWGLNQGQINLYFNAQQDRTQIYTNHCVATYNRGLENLRGTNTESWYNYHQFRREMTLMAMDLVALFPYYNLRQYPNGANPQLTREIYTDPVVFNPPANQGLCRRWRNNPYMTFSELENTFIRPPHLFDRLNSLTINSHRFPISSNFMDYWAGHTLRRSYMNNSAVQEDSYGATTSTRVTINTGVNGTNRIESTAVDFRSGLLGVYGVHRASFVPGGLFNGTISPANAGCRNLHDTRDELPLEENNGSPSHRLSHVTFLSFLTDQAGSIRNSGAVPLYVWARQDIDLNNTITANRITQLPLVKASEIAAGTTVVRGPGFTGGDILRRTSAGTLGTIRVNVNSPLTQRYRVRFRYASTTDFNFFVIRGGTTVNNFTFPRTMNSGQESRYESYVTREFSTSFNFLQIQDTLRLTVQSFSSGQQVYVDRIEIIPVNPTREAEEDLEAAKKAVANLFTHTRDGLQVNVTDYQVDQAANLVSCLSDEQYSHDKKMLLEAVRAAKRLSRERNLLQDPDFNEINTIEENGWKASNGVTISEGGPFFKGRALQLASARENNPTYIYQKVDASVLKPYTRYRLDGFVASSQDLELDLIHQHKVHLVKNVPDNLVSDSYSDGSCSGINRCEEQHLVDMQLDAEHHPMDCCEAAETHEFSSYIDTGDLNPSVDQGIWVVLKVRTTDGYATLGNLELVEVGPLSGESLEREQKDNAKWNAELGRKRAETDRVYQAAKQAINHLFVDYQDQQLNPEIGLAEMNEASNLLESIPGVYSDTVLQIPGVNYEIYTELSNRLQQASYLFMSRNAVQNGDFNNGLDSWNATTDATVQQDGTMHFLVLSHWDAQVSQPLRVQPNCKYVLRVTARKVGGGDGYVTIQDGAHHQETLTFNACDYDVNGTYVNDNTYITKEVVFYPETKHMWIEVSESEGAFYIDSIEFIEIQE

SEQ ID NO: 1426 - protein, 638 aa, Bacillus thuringiensis
EIIDGTNCGCSSDEVVKYPLTDDPNAGLQNMNYKEYLQTYDGDYTGSLINPNLSINTRDVLQTGINIVGRVLGFLGVPFAGQLVTFYTFLLNQLWPTNNNAVWEAFMAQIEELIDQRISEQVVRNALDALTGIHDYYNEYLAALEEWLERPNGARANLAFQRFENLHQLFVSQMPSFGSGPGSERDAVALLTVYAQAANLHLLLLKDAEIYGARWGLNQGQINLYFNAQQDRTQIYTNHCVATYNRGLENLRGTNTESWYNYHQFRREMTLMAMDLVALFPYYNLRQYPNGANPQLTREIYTDPVVFNPPANQGLCRRWRNNPYMTFSELENTFIRPPHLFDRLNSLTINSHRFPISSNFMDYWAGHTLRRSYMNNSAVQEDSYGATTSTRVTINTGVNGTNRIESTAVDFRSGLLGVYGVHRASFVPGGLFNGTISPANAGCRNLHDTRDELPLEENNGSPSHRLSHVTFLSFLTDQAGSIRNSGAVPLYVWARQDIDLNNTITANRITQLPLVKASEIAAGTTVVRGPGFTGGDILRRTSAGTLGTIRVNVNSPLTQRYRVRFRYASTTDFNFFVIRGGTTVNNFTFPRTMNSGQESRYESYVTREFSTSFNFLQIQDTLRLTVQSFSSGQQVYVD

SEQ ID NO: 1427 - protein, 249 aa, Bacillus thuringiensis
MENLNHCPLEDIKVNPWKTPQSTARVITLRVEDPNEINNLLSINEIDNPNYILQAIMLANAFQNALVPTSTDFGDALRFSMAKGLEIANTITPMGAVVSYVDQNVTQTNNQVSVMINKVLEVLKTVLGVALSGSVIDQLTAAVTNTFTNLNTQKNEAWIFWGKETANQTNYTYNVLFAIQNAQTGGVMYCVPVGFEIKVSAVKEQVLFFTIQDSASYNVNIQSLKFAQPLVSSSQYPIADLTSAINGTL

SEQ ID NO: 1428 - protein, 249 aa, Bacillus thuringiensis; identical to SEQ ID NO: 1427

SEQ ID NO: 1429 - protein, 249 aa, Bacillus thuringiensis; identical to SEQ ID NO: 520

SEQ ID NO: 1430 - protein, 250 aa, Bacillus thuringiensis
MENPNHCPLEDIQVNPWKTPQSKARVITLRIDDPNEINNLLSINEIENTNYLLQAIMLANAFQKALVPTSTEFAEDALQFSMTKGLEVANTISPPGAVVQYVDQNVSQTNNQVSAMINKVLDVLKSILGVALGQSVIEQLTSAVTNTFTNLNTQKNEAWIFWGRETSTQTNYTYNVLFAIQNGQTGGVMYCVPVGFEIKVSAVKERVLFLTIQDSASYNVNIQSLKFAQPLVSASEYPIADLTSAINGTL

SEQ ID NO: 1431 - protein, 265 aa, Bacillus thuringiensis
MKESIYYNEENEIQISQGNCFPEELGHNPWRQPQSTARVIYLKVKDPIDTTQLLEITEIENPNYVLQAIQLAAAFQDALVPTETEFGEAIRFSMPKGLEVAKTIQPKGAVVAYTDQTLSQSNNQVSVMIDRVISVLKTVMGVALSGSIITQLTAAITDTFTNLNTQKDSAWVFWGKETSHQTNYTYNVMFAIQNETTGRVMMCVPIGFEIRVFTDKRTVLFLTTKDYANYSVNIQTLRFAQPLIDSRALSINDLSEALRSSKYLY

SEQ ID NO: 1432 - protein, 525 aa, Bacillus thuringiensis
MAQSEFNQNLREQGQSRARVIILRVNNPGYNTNTLDIADIEDIIHLPQAIELANAFQSALVPTTSNFGEDTLRFDVERGLGIATHVYPRAINVNYVTRTLSQTNNQVQSMINKVIEELKSLLGINLANSVLQQLTTVITETFTNLYVQQQSAWLFWGRQTSSQTNYTYNIVFAIQNAQTGSFMKAIPIGFEISAYIARERLLFFNIQDYASYSVKIHAIQVMQPLIHESFQPLRGIFNIITSVNNRSAIQITEYYDENTHDYPVKLWDYNNIINQKWILVFNQTTRAYSIQNLIARYLVLTWDSTPGSNKVFASTNRWNDSQFWILESTADGSIFLTNMKDTQFVLEIENSSTTNGTNVIVNRKNNNAQQKFYLNKVNQEFQDGVYKIKTALNNSSVLQMSEDYFGYTSDYFVKLWTNNNNDINQKWIFEFDSTKSAYQIKSQRDPSLVLAWTWSVPTVKLPIPNNDDHLWFLQNAGSGTYYFVNMTDTRYVLEVASSSTTNGTILTINKRNGNLNQKFLLDMIN

SEQ ID NO: 1433 - protein, 259 aa, Bacillus thuringiensis
MYTKNFSNSRMEVKGNNGCSAPIIRKPFKHIVLTVPSSDLDNFNTVFYVQPQYINQALHLANAFQGAIDPLNLNFNFEKALQIANGIPNSAIVKTLNQSVIQQTVEISVMVEQLKKIIQEVLGLVINSTSFWNSVEATIKGTFTNLDTQIDEAWIFWHSLSAHNTSYYYNILFSIQNEDTGAVMAVLPLAFEVSVDVEKQKVLFFTIKDSARYEVKMKALTLVQALHSSNAPIVDIFNVNNYNLYHSNHKIIQNLNLSN

SEQ ID NO: 1434 - protein, 259 aa, Bacillus thuringiensis; identical to SEQ ID NO: 1433

SEQ ID NO: 1435 - protein, 259 aa, Bacillus thuringiensis
MYTKNFSNSRMEVKGNNGCSAPIIRKPFKHIVLTVPSSDLDNFNTVFYVQPQYINQALHLANAFQGAIDPLNLNFNFEKALQIANGIPNSAIVKTLNQSVIQQTVEISVMVEQLKKIIQEVLGLVINSTSFWNSVEATIKGTFTNLDTQIDEAWIFWHSLSAHNTSYYYNILFSIQNEDTGAVMAVLPLAFEVSVDVEKQKVLFFTIKDSARYEVKMKALTLVQALHSSDAPIVDIFNVNNYNLYHSNHKIIQNLNLSN

SEQ ID NO: 1436 - protein, 259 aa, Bacillus thuringiensis; identical to SEQ ID NO: 1433

SEQ ID NO: 1437 - protein, 263 aa, Bacillus thuringiensis
MHLNNLNNFNNLENNGEYHCSGPIIKKPFRHIALTVPSSDITNFNEIFYVEPQYIAQAIRLTNTFQGAIDPLTLNFNFEKALQIANGLPNAGVTGTINQSVIHQTIEVSVMISQIKEIIRSVLGLVINSANFWNSVVSAITNTFTNLEPQVDENWIVWRNLSATQTSYFYKILFSIQNEDTGRFMAILPIAFEITVDVQKQQLLFITIKDSARYEVKMKALTVVQALDSYNAPIIDVFNVRNYSLHRPNHNILQNLNVNPIKS

SEQ ID NO: 1438 - protein, 263 aa, Bacillus thuringiensis; identical to SEQ ID NO: 1437

SEQ ID NO: 1439 - protein, 263 aa, Bacillus thuringiensis; identical to SEQ ID NO: 1437

SEQ ID NO: 1440 - protein, 263 aa, Bacillus thuringiensis; identical to SEQ ID NO: 1437

SEQ ID NO: 1441 - protein, 246 aa, Bacillus thuringiensis
YHCSGPIIKKPFRHIALTVPSSDITNFNEIFYVEPQYIAQAIRLTNTFQGAIDPLTLNFNFEKALQIANGLPNAGVTGTINQSVIHQTIEVSVMISQIKEIIRSVLGLVINSANFWNSVVSAITNTFTNLEPQVDENWIVWRNLSATQTSYFYKILFSIQNEDTGRFMAILPIAFEITVDVQKQQLLFITIKDSARYEVKMKALTVVQALDSYNAPIIDVFNVRNYSLHRPNHNILQNLNVNPIKS

SEQ ID NO: 1442 - protein, 156 aa, Bacillus thuringiensis
NTFQGAIDPLTLNFNFEKALQIANGLPNAGVTGTINQSVIHQTIEVSVMISQIKEIIRSVLGLVINSANFWNSVVSAITNTFTNLEPQVDENWVVWRNLSATQTSYFYKILFSIQNEDTGRFMAILPIAFEITVDVQKQQLLFITIKDSARYEVKM

SEQ ID NO: 1443 - protein, 157 aa, Bacillus thuringiensis; identical to SEQ ID NO: 528

SEQ ID NO: 1444 - protein, 147 aa, Bacillus thuringiensis
MHLNNLNNFNNLENNGEYHCSGPIIKKPFRHIALTVPSSDITNFNEIFYVEPQYIAQAIRLTNTFQGAIDPLTLNFNFEKALQIANGLPNAGVTGTINQSVIHQTIEVSVMISQIKEIIRSVLGLVINSANFWNSVVSAITNTFTNL

SEQ ID NO: 1445 - protein, 263 aa, Bacillus thuringiensis; identical to SEQ ID NO: 1437

SEQ ID NO: 1446 - protein, 263 aa, Bacillus thuringiensis
MYTKNLNSLEINEDYQYSRPIIKKPFRHITLTVPSSDIASFNEIFYLEPQYVAQALRLTNTFQAAIDPLTLNFDFEKALQIANGLPNAGITGTLNQSVIQQTIEISVMISQIKEIIRNVLGLVINSTNFWNSVLAAITNTFTNLEPQVDENWIVWRNLSATHTSYYYKILFSIQNEDTGAFMAVLPIAFEITVDVQKQQLLFITIRDSARYEVKMKALTVVQLLDSYNAPIIDVFNVHNYGLYQSNHPNHHILQNLNLNKIKG

SEQ ID NO: 1447 - protein, 880 aa, Bacillus thuringiensis
MKNMKKKLASVVTCTLLAPMFLNGNVNAVYADSKTNQISTTQKNQQKEMDRKGLLGYYFKGKDFSNLTMFAPTRDSTLIYDQQTANKLLDKKQQEYQSIRWIGLIQSKETGDFTFNLSEDEQAIIEINGKIISNKGKEKQVVHLEKGKLVPIKIEYQSDTKFNIDSKTFKELKLFKIDSQNQPQQVQQDELRNPEFNKKESQEFLAKPSKINLFTQKMKREIDEDTDTDGDSIPDLWEENGYTIQNRIAVKWDDSLASKGYTKFVSNPLESHTVGDPYTDYEKAARDLDLSNAKETFNPLVAAFPSVNVSMEKVILSPNENLSNSVESHSSTNWSYTNTEGASVEAGIGPKGISFGVSVNYQHSETVAQEWGTSTGNTSQFNTASAGYLNANVRYNNVGTGAIYDVKPTTSFVLNNDTIATITAKSNSTALNISPGESYPKKGQNGIAITSMDDFNSHPITLNKKQVDNLLNNKPMMLETNQTDGVYKIKDTHGNIVTGGEWNGVIQQIKAKTASIIVDDGERVAEKRVAAKDYENPEDKTPSLTLKDALKLSYPDEIKEIEGLLYYKNKPIYESSVMTYLDENTAKEVTKQLNDTTGKFKDVSHLYDVKLTPKMNVTIKLSILYDNAESNDNSIGKWTNTNIVSGGNNGKKQYSSNNPDANLTLNTDAQEKLNKNRDYYISLYMKSEKNTQCEITIDGEIYPITTKTVNVNKDNYKRLDIIAHNIKSNPISSLHIKTNDEITLFWDDISITDVASIKPENLTDSEIKQIYSRYGIKLEDGILIDKKGGIHYGEFINEASFNIEPLQNYVTKYEVTYSSELGPNVSDTLESDKIYKDGTIKFDFTKYSKNEQGLFYDSGLNWDFKINAITYDGKEMNVFH

SEQ ID NO: 1448 - protein, 881 aa, Bacillus thuringiensis serovar entomocidus
  MISC_FEATURE (846)..(846): Xaa is Ala, Arg, Asn, Asp, Asx, Cys, Glu, Gln, Glx, Gly, His, Ile, Leu, Lys, Met, Phe, Pro, Ser, Thr, Trp, Tyr, or Val.
MKKKLASVVTCTLLAPMFLNGNVNAVYADSKTNQISTTQKNQQKEMDRKGLLGYYFKGKDFSNLTMFAPTRDSTLIYDQQTANKLLDKKQQEYQSIRWIGLIQSKETGDFTFNLSEDEQAIIEINGKIISNKGKEKQVVHLEKGKLVPIKIEYQSDTKFNIDSKTFKELKLFKIDSQNQPQQVQQDELRNPEFNKKESQEFLAKPSKINLFTQKMKREIDEDTDTDGDSIPDLWEENGYTIQNRIAVKWDDSLASKGYTKFVSNPLESHTVGDPYTDYEKAARDLDLSNAKETFNPLVAAFPSVNVSMEKVILSPNENLSNSVESHSSTNWSYTNTEGASVEAGIGPKGISFGVSVNYQHSETVAQEWGTSTGNTSQFNTASAGYLNANVRYNNVGTGAIYDVKPTTSFVLNNDTIATITAKSNSTALNISPGESYPKKGQNGIAITSMDDFNSHPITLNKKQVDNLLNNKPMMLETNQTDGVYKIKDTHGNIVTGGEWNGVIQQIKAKTASIIVDDGERVAEKRVAAKDYENPEDKTPSLTLKDALKLSYPDEIKEIEGLLYYKNKPIYESSVMTYLDENTAKEVTKQLNDTTGKFKDVSHLYDVKLTPKMNVTIKLSILYDNAESNDNSIGKWTNTNIVSGGNNGKKQYSSNNPDANLTLNTDAQEKLNKNRDYYISLYMKSEKNTQCEITIDGEIYPITTKTVNVNKDNYKRLDIIAHNIKSNPISSIHIKTNDEITLFWDDISITDVASIKPENLTDSEIKQIYSRYGIKLEDGILIDKKGGIHYGEFINEASFNIEPLQNYVTKYKVTYSSELGQNVSDTLESDKIYKDGTIKFDFTKYSXNEQGLFYDSGLNWDFKINAITYDGKEMNVFHRYNK

SEQ ID NO: 1449 - protein, 881 aa, Bacillus thuringiensis; identical to SEQ ID NO: 1448
  MISC_FEATURE (846)..(846): Xaa is Ala, Arg, Asn, Asp, Asx, Cys, Glu, Gln, Glx, Gly, His, Ile, Leu, Lys, Met, Phe, Pro, Ser, Thr, Trp, Tyr, or Val.

SEQ ID NO: 1450 - protein, 834 aa, Bacillus thuringiensis tenebrionis
MKNMKKKLASVVTCMLLAPMFLNGNVNAVNADSKINQISTTQENQQKEMDRKGLLGYYFKGKDFNNLTMFAPTRDNTLMYDQQTANALLDKKQQEYQSIRWIGLIQRKETGDFTFNLSKDEQAIIEIDGKIISNKGKEKQVVHLEKEKLVPIKIEYQSDTKFNIDSKTFKELKLFKIDSQNQSQQVQLRNPEFNKKESQEFLAKASKTNLFKQKMKRDIDEDTDTDGDSIPDLWEENGYTIQNKVAVKWDDSLASKGYTKFVSNPLDSHTVGDPYTDYEKAARDLDLSNAKETFNPLVAAFPSVNVSMEKVILSPNENLSNSVESHSSTNWSYTNTEGASIEAGGGPLGLSFGVSVTYQHSETVAQEWGTSTGNTSQFNTASAGYLNANVRYNNVGTGAIYDVKPTTSFVLNNNTIATITAKSNSTALRISPGDSYPEIGENAIAITSMDDFNSHPITLNKQQVNQLINNKPIMLETDQTDGVYKIRDTHGNIVTGGEWNGVTQQIKAKTASIIVDDGKQVAEKRVAAKDYGHPEDKTPPLTLKDTLKLSYPDEIKETNGLLYYDDKPIYESSVMTYLDENTAKEVKKQINDTTGKFKDVNHLYDVKLTPKMNFTIKMASLYDGAENNHNSLGTWYLTYNVAGGNTGKRQYRSAHSCAHVALSSEAKKKLNQNANYYLSMYMKADSTTEPTIEVAGEKSAITSKKVKLNNQNYQRVDILVKNSERNPMDKIYIRGNGTTNVYGDDVTIPEVSAINPASLSDEEIQEIFKDSTIEYGNPSFVADAVTFKNIKPLQNYVKEYEIYHKSHRYEKKTVFDIMGVHYEYSIAREQKKAA

SEQ ID NO: 1451 - protein, 769 aa, Bacillus cereus
MKNMKKKLASVVTCTLLAPMFFNGNVNTAYADNKINQDSSKQEYQQKEMDRKGLLGYYFKDKDFSNLTMFSPTRYNTLIYDQQTANKLLDKKQQEYQSIRWIGLIQSNKTGDFTFELSDDECAIIEMDGKVISNKGKEKQVVHLEKGKLVPIKIEYQLDEPLNIDDEKFKGFKLLKVDNQKQLHQVQQDELRNPEFNKKESQEFLAKASKINLFTKKIKRDIDEGTDTDGDSIPDMWEENGYTIQNRIAVKWNDSLASKGYTKFVSNPLDSHTVGDPYTDYEKASRDLDLSNAKETFNPLVAAFPSVNVSMEKVILSPNKNLSNSVESHSSTNWSYTNTEGASVEAGIGPKGFSFGVSANYQHSETVAQEWGASIGDTTQLNTASAGYLNANVRYNNVGTGAIYDVKPTTSFVLEKNTIATITAKSNSTALSISPGESYPKKGQNGIAITSMDDFNSHPITLNKKQLDQVLTNNPIMLETDQTDGIYKIKDTHGNIVTGGTWNGVTQQIKAKTASIIVDDGKQVAEKRVAAKDYAYPEDKTPSLTLKDALKLSFPEEIKETDGLLYYNNKPIYESSVMTYLDGNTAKEVKKQINDKTGEFKDVQHLYAVKLTPKMNFTIKVPVAYDTAKQAVNLGGDNPWGAKGLLGTWVNAMVVDNSGDKAYKRVEPGYLLSPTLEFSEGSLDNLKKNYSFYVSMYVKSDKPFTLRINAGPYSTKRTIEASNDFKRVDIPAFYIEGFPIDTIRLEGSDYPSAIWWKDVSITEVSAVKK

SEQ ID NO: 1452 - protein, 784 aa, Bacillus laterosporus
MTYMKKKLVSVVTCTLLAPMFLNGNVNPVYADNQTNQLSTAQENQEKEVDRKGLLGYYFKGKEFNHLTLFAPTRDNTLIYDQQTVDSLLDKKQQEYQSIRWIGLIQSKETGDFTFNLSDDKNAIMEIDTKTISHKGQNKQVVHLEKGKLVPIKIEYQPDQIVNRDSKIFKEFKLFKVDSKQQSHQVQLDELRNPEFNKKETQQFLEKASKTNLFTQNMKRDEDATDTDGDSIPDLWEENGYTIQNKVAVKWDDSFAAKGYTKFVSNPFDSHTVGDPYTDYEKAARDLDLANAKETFNPLVAAFPSVNVNLEKVILSPNEDLSNSVESHSSTNWSYTNTEGVSIEAGSGPLGISYGVSANYQHSETVAKEWGTSTGNTSQFNTASAGYLNANVRYNNVGTGAIYEVKPTTGFVLDNDTVATITAKSNSTALSISPGESYPKKGQNGIAINTMDDFNSHPITLNKQQLDQIFNNKPLMLETNQADGVYKIKDTSGNIVTGGEWNGVIQQIQAKTASIIVDTGEGVSEKRVAAKDYDNPEDKTPSLSLKEALKLGYPEEIKEKDGLLYYNDKPIYESSVMTYLDENTAKEVKEQLNDITGKFKDVKQLFDVKLTPKMNFTIKLATLYDGAEDGSSPTDVGISSPLGEWAFKPDINNVEGGNTGKRQYQLSKNKDGYYYGMLALSPEVSNKLKKNYQYYISMSIKADAGVEPTVTVMDNLNCIVDKKLKLSSNGYQRFDILVDNSESHPINVMVIDLGVSSQDYNNYSKNIYIDDITITEVSAMKVKN

SEQ ID NO: 1453 - protein, 785 aa, Brevibacillus laterosporus
MTYMKKKLVSVVTCALLAPMFLNGNVNPVYADNQTNQLSTAQENQEKEVDRKGLLGYYFKGKEFNHLTLFAPTRDNTLIYDQQTVDFLLDKKQQEYQSIRWIGLIQSKETGDFTFNLSDDKNAIIEIDGKTISHKGQNKQVVHLEKGKLVPIKIEYQSDQIVNRDSKIFKEFKLFKVDSQQQSHQVQLDELRNPEFNKKETQQFLEKASKTNIFTQNMKRDEDATDTDGDSIPDLWEENGYTIQNKVAVKWDDSFAAKGYTKFVSNPFDSHTVGDPYTDYEKAARDLDLANAKETFNPLVAAFPSVNVNLEKVILSPNEDLSNSVESHSSTNWSYTNTEGASIEAGSGPLGISYGVSANYQHSETVAKEWGTSTGNTSQFNTASAGYLNANVRYNNVGTGAIYEVKPTTGFVLDNDTVATITAKSNSTALSISPGESYPKKGQNGIAINTMDDFNSHPITLNKQQLDQIFNNKPLMLETNQADGVYKIKDTSGNIVTGGEWNGVIQQIQAKTASIIVDTGEGVSEKRVAAKDYDNPEDKTPSLSLKEALKLGYPEEIKEKDGLLYYNDKPIYESSVMTYLDENTAKEVKEQLNDITGKFKDVKQLFDVKLTPKMNFTIKLATLYDGAEDGSSPTDVGISSPLGEWAFKPDINNVEGGNTGKRQYQLSKNKDGYYYGMLALSPEVSNKLKKNYQYYISMSIKADAGVEPTVTVMDNLLNGIVDKKLKLSSNGYQRFDILVDNSESHPINVMVIDLGVSSQDYNNYSKNIYIDDITITEVSAMKVKN

SEQ ID NO: 1454 - protein, 860 aa, Bacillus thuringiensis
MTYMKKKLVSVVTCTLLAPIFLTGNVHPVNADSKKSQPSTAQEKQEKPVDRKGLLGYFFKGKEFNHLTLFAPTRDNTLIYDQQTANSLLDTKQQEYQSIRWIGLIQSKETGDFTFNLSDDQNAIIEIDGKIISHKGQNKQVVHLEKGKLVPIKIEYQSDQILTRDSNIFKEFQLFKVDSQQHSHQVQLDELRNPDFNKKETQQFLEKAAKTNLFTQNMKRDTDDDDDTDTDGDSIPDLWEENGYTIQNKVAVKWDDSFAAKGYTKFVSNPLESHTVGDPYTDYEKAARDLDLANAKETFNPLVAAFPSVNVNLEKVILSPDENLSNSVESHSSTNWSYTNTEGASIEAGGGPLGISFGVSANYQHSETVAKEWGTSTGNTSQFNTASAGYLNANVRYNNVGTGAIYEVKPTTSFVLDKDTVATITAKSNSTALSISPGESYPKKGQNGIAINTMDDFNSHPITLNKQQLDQLLNNKPLMLETNQADGVYKIKDTSGNIVTGGEWNGVIQQIQAKTASIIVDTGESVSEKRVAAKDYDNPEDKTPSLSLKEALKLGYPEEIKEKDGLLYYKDKPIYESSVMTYLDENTAKEVEKQLQDTTGIYKDINHLYDVKLTPTMNFTIKLASLYDGAENNDVKNGPIGHWYYTYNTGGGNTGKHQYRSANPSANVVLSSEAKSKLDKNTNYYLSMYMKAESDTEPTIEVSGENSTITSKKVKLNSEGYQRVDILVPNSERNPINQIYVRGNNTTNVYWDDVSITNISAINPKTLTDEEIKEIYKDFSESKDWPWFNDVTFKNIKPLENYVKQYRVDFWNTNSDRSFNRIKDSYPVNEDGSVKVNMTEYNEGYPLRIESAYHLNISDL

SEQ ID NO: 1455 - protein, 860 aa, Bacillus thuringiensis; identical to SEQ ID NO: 1454

SEQ ID NO: 1456 - protein, 775 aa, Bacillus thuringiensis serovar israelensis
MKNMKKKLASVVTCTLLAPMFLNGNVNAVYADSKTNQISTTQKNQQKEMDRKGLLGYYFKGKDFSNLTMFAPTRDNTLIYDQQTANKLLDKKQQQYQSIRWIGLIQSKEKGDFTFNLSEDEQAIIEIDGKIISNKGKEKQVVHLEKEKLVPIKIEYQSDTKFNIDSKTFKEFKLFKIDSQNQSQQVKRDELRNPEFNKKESREFLAKASKTNFFMQKMKRDIDEDTDTDGDSIPDLWEENGYTIQNKVAVKWDDKFAQQGYVKYLSSPYQAHTVGDPYTDWEKAAGDIPKSNAAATRNPLVAAFPSINVDMRKMILSKDSNLSNSAEAHSNNSYTYANSEGASIEAGFGPKGFSFGVSANYQHTETVGSDWGNSKSNTEQFNSASAGYLNANVHYNNVGTGGIYDAQPTTSFILQDSTIATITAKSNATALSIPSGDRYPASKEGISLKTMDDFNSHPITLNKPQLDAVLNNEVIKINTDQTDGRYGIIGVDGKAEIGDRWSPIIDEIKGRTASIIIDPADGKALETRIAAKDYKNPEDKTPSLTIKEGLKIAYPESISEDKDGILFYEYKNDEGKVTKKQLSEENIMPYLDEDTSKEFERQLSDGSAKGLYDIKLTPKMNITIRLATVTLGFDDQFSAYPWENATWSDKFGNLRLGSLAIPQESKYTIPKDKVKPNYDYLITGYIKHDFTTDNESLGIVAFTKKDNFEMWNMGTSIFSQNSGGEFKKFTIKTQNISGDYILDSIQLMKRNNDVNKIDSYLDDISIIPIGPNKSR

SEQ ID NO: 1457 - protein, 871 aa, Brevibacillus laterosporus
MKYMKKGLSSVVIGTLFASMFLNGNVNAVYANSKTNQIATTTQASKDNQIDREGLLGYYFKGKDFNDLTLFAPTRDNTLIYDQQTANTLVDQKHQEYHSIRWIGLIQSSATGDFTFKLSDDENAIIELDGKVISEKGNNKQSVHLEKGQLVQIKIEYQSDDALHIDNKIFKELKLFKIDSQNHSQQVQQDELRNPEFNKKETQVFLKKASKTNLFTQKTKRDIDEDTDTDGDSIPDVWEENGYTIQNKVAVKWDDSLASKGYQKFTSNPLEAHTVGDPYSDYEKAARDMPLSNAKETFNPLVAAFPSVNVSLEKVILSKNEDLSHSVESSQSTNWSYTNTEGVNVNAGWSGLGPSFGVSVNYQHSETVANEWGSATNDGTHINGAESAYLNANVRYNNVGTGAIYETKPTTSFILDGTTIGTIKAKENTTALTILPDQSYPEKGKNGIAINTMDDFNSRPIPLNKEQLNTYLSNKKPILLETDQVEGKYAIKDTNGNITIAGDWNGITDEISAKTASIIVDNGNQMSEKRVAAKDYTNPEDKTPNLSVKEALKLAYPDEIEEKDGLLFYNDQPIFEASVQSYVDEYTAKQIRKQLNDSTGSFKDVKNLYDVKLEPKMNFTIKTSTLYDGGESDNTKIGNWYYTYVVNGGNTGKKQYRSANKGAFTELSTESKNKLKKNIDYYVSLYMKADSKVSVDIEIDGKQESIVTDNITLDHVGYQRINILVPNLEGNEINTISIKGDGQTNVYWDDVSFVEVGAEEIEYKDPVPQFDIIEGDFDFFGDPLAVKYHDATYFIDSPLITQTPGTFSFTYKVIGEQTKTVLDSGSGKNANRINLDFKNVKSDRSFLYTLSCKDDLWGSTRTAVVRIFAVD

SEQ ID NO: 1458 - protein, 280 aa, Bacillus thuringiensis
MKRMEGKLFMVSKKLQVVTKTVLLSTVFSISLLNNEVIKAEQLNINSQSKYTNLQNLKITDKVEDFKEDKEKAKEWGKEKEKEWKLTATEKGKMNNFLDNKNDIKTNYKEITFSMAGSFEDEIKDLKEIDKMFDKTNLSNSIITYKNVEPTTIGFNKSLTEGNTINSDAMAQFKEQFLDRDIKFDSYLDTHLTAQQVSSKERVILKVTVPSGKGSTTPTKAGVILNNSEYKMLIDNGYMVHVDKVSKVVKKGVECLQIEGTLKKSLDFKNDINAEAHSWG

SEQ ID NO: 1459 - protein, 446 aa, Bacillus thuringiensis
MFMVSKKLQVVTKTVLLSTVFSISLLNNEVIKAEQLNINSQSKYTNLQNLKITDKVEDFKEDKEKAKEWGKEKEKEWKLTATEKGKMNNFLDNKNDIKTNYKEITFSMAGSFEDEIKDLKEIDKMFDKTNLSNSIITYKNVEPTTIGFNKSLTEGNTINSDAMAQFKEQFLDRDIKFDSYLDTHLTAQQVSSKERVILKVTVPSGKGSTTPTKAGVILNNSEYKMLIDNGYMVHVDKVSKVVKKGVECLQIEGTLKKSLDFKNDINAEAHSWGMKNYEEWAKDLTDSQREALDGYARQDYKEINNYLRNQGGSGNEKLDAQIKNISDALGKKPIPENITVYRWCGMPEFGYQISDPLPSLKDFEEQFLNTIKEDKGYMSTSLSSERLAAFGSRKIILRLQVPKGSTGAYLSAIGGFASEKEILLDKDSKYHIDKVTEVIIKVLSDM

SEQ ID NO: 1460 - protein, 446 aa, Bacillus thuringiensis; identical to SEQ ID NO: 1459

SEQ ID NO: 1461 - protein, 462 aa, Bacillus thuringiensis tenebrionis
MQRMEGKLFVVSKTLQVVTRTVLLSTVYSITLLNNVVIKADQLNINSQSKYTNLQNLKIPDNAEDFKEDKGKAKEWGKEKGEEWRPPATEKGEMNNFLDNKNDIKTNYKEITFSMAGSCEDEIKDLEEIDKIFDKANLSSSIITYKNVEPATIGFNKSLTEGNTINSDAMAQFKEQFLGKDMKFDSYLDTHLTAQQVSSKKRVILKVTVPSGKGSTTPTKAGVILNNNEYKMLIDNGYVLHVDKVSKVVKKGMECLQVEGTLKKSLDFKNDINAEAHSWGMKIYEDWAKNLTASQREALDGYARQDYKEINNYLRNQGGSGNEKLDAQLKNISDALGKKPIPENITVYRWCGMPEFGYQISDPLPSLKDFEEQFLNTIKEDKGYMSTSLSSERLAAFGSRKIILRLQVPKGSTGAYLSAIGGFASEKEILLDKDSKYHIDKATEVIIKGVKRYVVDATLLTN

SEQ ID NO: 1462 - protein, 280 aa, Bacillus thuringiensis
MKRMEGKLFMVSTKLQAVTKAVLLSTVLSISLLNNEVIKAEQLNMNSQNKYTNFENLKITDKVEDFKEDKEKAKEWGKEKEKEWKLTATEKGKMNNFLDNKNDIKTNYKEITFSMAGSFEDEIKDLKEIDKIFDKANLSSPIITYKNVEPATIGFNKSLTEGNTINSDAMAQFKEQFLDRDIKFDSYLDTHLTVQQVSSKERVILKVKVPSGKGSTTPTKAGIILNNSEYKMLIDNGYMVHVDKVSKVVKKGVECLQVEGTLKKSLDFKNDINAGAHSWG

SEQ ID NO: 1463 - protein, 457 aa, Brevibacillus laterosporus
MIVIIFTNVKGGNELKKNFYKNLICMSALLLAMPISSNVTYAYGSEKVDYLVKTTNNTEDFKEDKEKAKEWGKEKEKEWKLTVTEKTRMNNFLDNKNDIKKNYKEITFSMAGSFEDEIKDLKEIDKMFDKANLSSSIVTYKNVEPSTIGFNKPLTEGNTINTDVQAQFKEQFLGKDIKFDSYLDTHLTAQNVSSKERIILQVTVPSGKGSTIPTKAGVILNNNEYKMLIDNGYVLHVDNISKVVKKGYECLQIQGTLKKSLDFKNDINAEAHRWGMKNYEGWAKNLTDPQREALDGYARQDYKQINDYLRNQGGSGNEKLDTQIKNISEALEKQPIPENITVYRWCGMAEFGYQISDPLPSLKEMEEKFLNTMKEDKGYMSTSLSSERLSAFGSRKFILRLQVPKGSTGAYLSAIGGFASEKEILIDKDSNYHIDKITEVVIKGVKRYVVDATLLTK

SEQ ID NO: 1464 - protein, 462 aa, Bacillus thuringiensis serovar israelensis
MQRMEGKLFMVSKKLQAVTKTVLLSTVLSISLLNNEEVKAEQLNINSQNKYTNFQNLKITDNAEDFKEDKEKAKEWGEEKEKEWKLTATEKGKMNNFLDNKNDIKTNYKEITFSMAGSFEDEIKDLKEIDKIFDKANLSSSIITYKNVEPATIGFNKSLTEGNTINSDAMAQFKEQFLGKDMKFDSYLDTHLTAHQVSSKKRVILKVTVPSGKGSTTPTKAGVILTNNEYKMLIDNGYVLHVDKVSKVVKKGMECLQVEGTLKKSLDFKNDINAEAHSWGMKIYEDWAKNLTASQREALDGYARQDYKEINNYLRNQGGSGNEKLDAQIKNISDALGKKPIPENITVYRWCGMPEFGYQISDPLPSLKDFEEQFLNTIKEDKGYMSTSLSSERLAAFGSRKIILRLQVPKGSTGAYLSAIGGFASEKEILLDKDSKYHIDKATEVIIKGVKRYVVDATLLTN

SEQ ID NO: 1465 - protein, 280 aa, Bacillus thuringiensis serovar israelensis
MKRMEGKLFMVSKKLQLVTKALLFSTVLSIPLLNNEEVKAEHLNLNSQSKYPSFQNQKITDNAEDFKEDKEKAKEWGEVKEKEWKLTATEKRKINDFLNDTNKIKTNYKEITFSMAGSFEDELKDLKEIDKMFDKANLSSSIITYKNVEPATIGFNKSLTEGNTINSDVMAQFKEQFLGKDIKFDSYLDTHLTVQQVSSKERVILKVTVPSGKGSTTPTKAGVILDGNEHKMLIDNGYVLHVDKVSKVVKRGLECLQVEGTLKKSLDFKNDISAKAHSWG

SEQ ID NO: 1466 - protein, 462 aa, Bacillus thuringiensis serovar israelensis
MKRMEGKLFMVSKKLQLVTKALLFSTVLSIPLLNNEEVKAEHLNLNSQSKYPSFQNQKITDNAEDFKEDKEKAKEWGEVKEKEWKLTATEKRKINDFLNDTNKIKTNYKEITFSMAGSFEDELKDLKEIDKMFDKANLSSSIITYKNVEPATIGFNKSLTEGNTINSDVMAQFKEQFLGKDIKFDSYLDTHLTVQQVSSKERVILKVTVPSGKGSTNPTKAGVILDGNEHKMLIDNGYVLHVDKVSKVVKKGLECLQVEGTLKKSLDFKNDISAKAHSWGMKNYEEWAANLTDSQRKALDGYARQDYKKINDYLRNQGGSGNEQLDAQIKNISETLNNKPIPENITVYRWCGMPEFGYQISEPLPALKDFEWEFLNTIKEDKGYISTSLSSERLAAFGSRKIILRLQIPKGSKGAYLSAIGGFANEKEILLDKDSKYHINKITEVVIKGIKRYVVDATLLTN

SEQ ID NO: 1467 - protein, 280 aa, Bacillus thuringiensis
MKRMEGKLFMVSRKLQLVTKALLFSTVLSIPLLNNEEVKAEHLNLNSQSKYPSFQNQKITDNAEDFKEDKEKAKEWGEVKEKEWKLTATEKRKINDFLNDTNKIKTNYKEITFSMAGSFEDELKDLKEIDKMFDKANLSSSIITYKNVEPATIGFNKSLTEGNTINSDVMAQFKEQFLGKDIKFDSYLDTHLTVQQVSSKERVILKVTVPSGKGSTNPTKAGVILDGNEPKMLIDNGYVLHVDKVSKVVKKGLECLQVEGTLKKSLDFKNDISAKAHSWG

SEQ ID NO: 1468 - protein, 462 aa, Bacillus thuringiensis
MKRMEGKLFMVSKKLQLVTKALLFSTVLSIPLLNNEEVKAEHLNLNSQSKYPSFQNQKITDNAEDFKEDKEKAKEWGEVKEKEWKLTATEKRKINDFLNDTNKIKTNYKEITFSMAGSFEDELKDLKEIDKMFDKANLSSSIITYKNVEPATIGFNKSLTEGNTINSDVMAQFKEQFLGKDIKFDSYLDTHLTVQQVSSKERVILKVTVPSGKGSTTPTKAGVILDGNEHKMLIDNGYVLHVDKVSKVVKRGLECLQVEGTLKKSLDFKNDISAKAHSWGMKNYEEWAANLTDSQRKALDGYARQDYKKINDYLRNQGGSGNEQLDAQIKNISETLNNKPIPENITVYRWCGMPEFGYQISEPLPALKDFEWEFLNTIKEDKGYISTSLSSERLAAFGSRKIILRLQIPKGSKGAYLSAIGGFANEKEILLDKDSKYHINKITEVVIKGIKRYVVDATLLTN

SEQ ID NO: 1469 - protein, 451 aa, Bacillus laterosporus
MVSKKLQLITKTLVFSTVLSIPLLNNSEIKAEQLNMNSQIKYPNFQNINIADKPVDFKEDKEKAREWGKEKEKEWKLTVTEKGKINDFLDDKDGLKTKYKEINFSKNFEYETELKELEKINTMLDKANLTNSIVTYKNVEPTTIGFNQSLIEGNQINAEAQQKFKEQFLGQDIKFDSYLDMHLTEQNVSSKERVILKVTVPSGKGSTPTKAGVVLNNNEYKMLIDNGYVLHVENITKVVKKGQECLQVEGTLKKSLDFKNDSDGKGDSWGKKNYKEWSDTLTTDQRKDLNDYGVRGYTEINKYLREGDTGNTELEEKIKNISDALEKNPIPENITVYRYCGMAEFGYPIKPEAPSVQDFEERFLDTIKEEKGYMSTSLSSDATSFGARKIILRLQVPKGSSGAYVAGLDGFKPAEKEILIDKGSKYRIDKVTEVVVKGTRKLVVDATLLTK

SEQ ID NO: 1470 - protein, 350 aa, Bacillus laterosporus
MKRMEERLFMVSKKLQLITKTLVFSTVLSIPLLNNSEIKAEQLNMNSQIKYPNFQNINIADKPVDFKEDKEKAREWGKEKEKEWKLTATEKGKINDFLDDKDGLKTKYKEINFSKNFEYETELKELEKINTMLDKANLTNSIVTYKNVEPTTIGFNQSLIEGNQINAEAQQKFKEQFLGQDIKFDSYLDMHLTEQNVSSKERVILKVTVPSGKGSTPTKAGVVLNNNEYKMLIDNGYVLHVENITKVVKKGQECLQVEGTLKKSLDFKNDSDGKGDSWGKKNYKEWSDTLTTDQRKDLNDYGARGYTEINKYLREGGTGNTELEEKIKNISDALEKNPIPENITVYRYCG

SEQ ID NO: 1471 - protein, 350 aa, Bacillus thuringiensis; identical to SEQ ID NO: 1470

SEQ ID NO: 1472 - protein, 350 aa, Bacillus thuringiensis serovar israelensis; identical to SEQ ID NO: 1470

SEQ ID NO: 1473 - protein, 789 aa, Bacillus thuringiensis
MNKNNTKLSTRALPSFIDYFNGIYGFATGIKDIMNMIFKTDTGGDLTLDEILKNQQLLNDISGKLDGVNGSLNDLIAQGNLNTELSKEILKIANEQNQVLNDVNNKLDAINTMLRVYLPKITSMLSDVMKQNYALSLQIEYLSKQLQEISDKLDIINVNVLINSTLTEITPAYQRIKYVNEKFEELTFATETSSKVKKDGSPADILDELTELTELAKSVTKNDVDGFEFYLNTFHDVMVGNNLFGRSALKTASELITKENVKTSGSEVGNVYNFLIVLTALQAQAFLTLTTCRKLLGLADIDYTSIMNEHLNKEKEEFRVNILPTLSNTFSNPNYAKVKGSDEDAKMIVEAKPGHALIGFEISNDSITVLKVYEAKLKQNYQVDKDSLSEVIYGDMDKLLCPDQSEQIYYTNNIVFPNEYVITKIDFTKKMKTLRYEVTANFYDSSTGEIDLNKKKVESSEAEYRTLSANDDGVYMPLGVISETFLTPINGFGLQADENSRLITLTCKSYLRELLLATDLSNKETKLIVPPSGFISNIVENGSIEEDNLEPWKANNKNAYVDHTGGVNGTKALYVHKDGGISQFIGDKLKPKTEYVIQYTVKGKPSIHLKDENTGYIHYEDTNNNLEDYQTINKRFTTGTDLKGVYLILKSQNGDEAWGDNFIILEISPSEKLLSPELINTNNWTSTGSTNISGNTLTLYQGGRGILKQNLQLDSFSTYRVYFSVSGDANVRIRNSREVLFEKRYMSGAKDVSEMFTTKFEKDNFYIELSQGNNLYGGPIVHFYDVSIK

SEQ ID NO: 1474 - protein, 789 aa, Bacillus thuringiensis; identical to SEQ ID NO: 1473

SEQ ID NO: 1475 - protein, 746 aa, Bacillus thuringiensis
MNKNNAKLSTRALPSFIDYFNGIYGFATGIKDIMNMIFKTDTGGDLALDEILENQQLLNDISGKLDGVNGSLNDLIAQGNLNTELSKEILKIANEQNQVLNDVNNKLDAINTMLRVYLPKITSMLSDVMKQNYALSLQIEYLSKQLQEISDKLDIINVNVLINSTLTEITPAYQRIKYVNEKFEELTFATETSSKVKKDGSPADIRDELSELTELAKSVTQNDVDGFEFYLNTFHDVMVGNNLFGRSALKTASELITKENVKTSGSEVGNVYNFLIVLTALQAQAFLTLTPCRKLLGLADIDYTSIMNEHLNKEKEEFRVNILPTLSNTFSNPNYAKVKGSDEDAKMIVEAKPGHALIGFEISNDSITVLKVYEAKLKQNYQVDKDSLSEVIYGDMDKLLCPDQSGQIYYTNNIVFPNEYVITKIDFTKKMKTLRYEVTANFYDSSTGEIDLNKKKVESSEAEYRTLSANDDGVYMPLGVISETFLTPINGFGLQADENSRLITLTCKSYLRELLLATDLSNKETKLIVPPSGFISNIVENGSIEEDNLEPWKANNKNAYVDHTGGVNGTKALYVHKDGGISQFIGDKLKPKTEYVIQYTVKGKPSIHLKDENTGYIHYEDTNNNLEDYQTINKRFTTGTDLKGVYLILKSQNGDEAWGDNFIILEISPSEKLLSPELINTNNWTSTGSTNISGNTLTLYQGGRGILKQNLQLDSFSTYRVYFSVSGDANVRIRNSREVLFEKKDI

SEQ ID NO: 1476 - protein, 790 aa, Bacillus thuringiensis
MNKNNTKLSTRALPSFIDYFNGIYGFATGIKDIMNMIFKTDTGGDLTLDEILKNQQLLNDISGKLDGVNGSLNDLIAQGNLNTELSKEILKIANEQNQVLNDVNNKLDAINTMLRVYLPKITSMLSDVMKQNYALSLQIEYLSKQLQEISDKLDIINVNVLINSTLTEITPAYQRIKYVNEKFEELTFATETSSKVKKDGSPANILDELTELTELAKSVTKNDVDGFEFYLNTFHDVMVGNNLFGRSALKTASELITKENVKTSGSEVGNVYNFLIVLTALQAKAFLTLTTCRKLLGLADIDYTSIMNEHLNKEKEEFRVNILPTLSNTFSNPNYAKVKGSDEDAKMIVEAKPGHALIGFEISNDSITVLKVYEAKLKQNYQVDKDSLSEVIYGDMDKLLCPDQSEQIYYTNNIVFPNEYVITKIDFTKKMKTLRYEVTANFYDSSTGEIDLNKKKVESSEAEYKTLSANDDGVYMPLGVISETFLTPINGFGLQADENSRLITLTCKSYLRELLLATDLSNKETKLIVPPSGFISNIVENGSIEEDNLEPWKANNKNAYVDHTGGVNGTKALYVHKDGGISQFIGDNLKPKTEYVIQYTVKGKPSIHLIDENTGYIHYEDTNNNLEDYQTINKRFTTGTDLKGVYLILKSQNGDEAWGDNFIILEISPSEKLLSPELINTNNWTSTGSTNISGNTLTLYQGGRGILKQNLQLDSFSTYRVYFSVSGDANVRIRNSREVLFEKRYMSGAKDVSEMFTTKFEKDNFYIELSQGNNLYGGPIVHFYDVSIKP

SEQ ID NO: 1477 - protein, 789 aa, Bacillus thuringiensis
MNKNNTKLSTRALPSFIDYFNGIYGFATGIKDIMNMIFKTDTGGDLTLDEILKNQQLLNDISGKLDGVNGSLNDLIAQGNLNTELSKEILKIANEQNQVLNDVDNKLDAINTMLRVYLPKITSMLSDVMKQNYALSLQIEYLSKQLQEISDKLDIINVNVLINSTLTEITPAYQRIKYVNEKFEELTFATETSSKVKKDGSPADILDELTELTELAKSVTKNDVDGFEFYLNTFHDVMVGNNLFGRSALKTASELITKENVKTSGSEVGNVYNFLIVLTALQAKAFLTLTTCRKLLGLADIDYTSIMNEHLNKEKEEFRVNILPTLSNTFSNPNYAKVKGSDEDAKMIVEAKPGHALVGFEISNDSITVLKVYEAKLKQNYQVDKDSLSEVIYGDMDKLLCPDQSEQIYYTNNIVFPNEYVITKIDFTKKMKTLRYEVTANFYDSSTGEIDLNKKKVESSEAEYRTLSANDDGVYMPLGVISETFLTPINGFGLQADENSRLITLTCKSYLRELLLATDLSNKETKLIVPPSGFIKNIVENGSIEEDNLEPWKANNKNEYVDHTGGVNGTKALYVHKDGGISQFIGDKLKPKTEYVIQYTVKGKPSIHLKDENTGYIHYEDTNNNLEDYQTITKRFTTGTDLKGVYLILKSQNGDEAWGDNFIILEISPSEKLLSPELINTNNWTSTGSTNISGNTLTLYQGGRGILKQNLQLDSFSTYRVYFSVSGDANVRIRNSREVLFEKRYMSGAKDVSEIFTTKFGKDNFYIELSQGNNLNGGPIVQFPDVSIK

SEQ ID NO: 1478 - protein, 790 aa, Bacillus thuringiensis
MNKNNTKLSTRALPSFIDYFNGIYGFATGIKDIMNMIFKTDTGGDLTLDEILKNQQLLNDISGKLDGVNGSLNDLIAQGNLNTELSKEILKIANEQNQVLNDVNNKLDAINTMLRVYLPKITSMLSDVMKQNYALSLQIEYLSKQLQEISDKLDIINVNVLINSTLTEITPAYQRIKYVNEKFEELTFATETSSKVKKDGSPADILDELTELTELAKSVTKNDVDGFEFYLNTFHDVMVGNNLFGRSALKTASELITKENVKTSGSEVGNVYNFLIVLTALQAKAFLTLTTCRKLLGLADIDYTSIMNEHLNKEKEEFRVNILPTLSNTFSNPNYAKVKGSDEDAKMIVEAKPGHALIGFEISNDSITVLKVYEAKLKQNYQVDKDSLSEVIYGDMDKLLCPDQSEQIYYTNNIVFPNEYVITKIDFTKKMKTLRYEVTANFYDSSTGEIDLNKKKVESSEAEYRTLSANDDGVYMPLGVISETFLTPINGFGLQADENSRLITLTCKSYLRELLLATDLSNKETKLIVPPSGFISNIVENGSIEEDNLEPWKANNKNAYVDHTGGVNGTKALYVHKDGGISQFIGDKLKPKTEYVIQYTVKGKPSIHLKDENTGYIHYEDTNNNLEDYQTINKRFTTGTDLKGVYLILKSQNGDEAWGDNFIILEISPSEKLLSPELINTNNWTSTGSTNISGNTLTLYQGGRGILKQNLQLDSFSTYRVYFSVSGDANVRIRNSREVLFEKRYMSGAKDVSEMFTTKFEKDNFYIELSQGNNLYGGPIVHFYDVSIKP

SEQ ID NO: 1479 - protein, 789 aa, Bacillus thuringiensis
MNKNNTKLSTRALPSFIDYFNGIYGFATGIKDIMNMIFKTDTGGDLTLDEILKNQQLLNDISGKLDGVNGSLNDLIAQGNLNTELSKEILKIANEQNQVLNDVNNKLDAINTMLRVYLPKITSMLSDVMKQNYALSLQIEYLSKQLQEISDKLDIINVNVLINSTLTEITPAYQRIKYVNEKFEELTFATETSSKVKKDGSPADILDELTELTELAKSVTKNDVDGFEFYLNTFHDVMVGNNLFGRSALKTASELITKENVKTSGSEVGNVYNFLIVLTALQAKAFLTLTTCRKLLGLADIDYTSIMNEHLNKEKEEFRVNILPTLSNTFSNPNYAKVKGSDEDAKMIVEAKPGHALIGFEISNDSITVLKVYEAKLKQNYQVDKDSLSEVIYGDMDKLLCPDQSEQIYYTNNIVFPNEYVITKIDFTKKMKTLRYEVTANFYDSSTGEIDLNKKKVESSEAEYRTLSANDDGVYMPLGVISETFLTPINGFGLQADENSRLITLTCKSYLRELLLATDLSNKETKLIVPPSGFISNIVENGSIEEDNLEPWKANNKNAYVDHTGGVNGTKALYVHKDGGISQFIGDKLKPKTEYVIQYTVKGKPSIHLKDENTGYIHYEDTNNNLEDYQTINKRFTTGTDLKGVYLILKSQNGDEAWGDNFIILEISPSEKLLSPELINTNNWTSTGSTNISGNTLTLYQGGRGILKQNLQLDSFSTYRVYFSVSGDANVRIRNSREVLFEKRYMSGAKDVSEMFTTKFEKDNFYIELSQGNNLYGGPIVHFYDVSIK

SEQ ID NO: 1480 - protein, 789 aa, Bacillus thuringiensis; identical to SEQ ID NO: 1479

SEQ ID NO: 1481 - protein, 789 aa, Bacillus thuringiensis
MNKNNTKLSTRALPSFIDYFNGIYGFATGIKDIMNMIFKTDTGGDLTLDEILKNQQLLNDISGKLDGVNGSLNDLIAQGNLNTELSKEILKIANEQNQVLNDVNNKLDAINTMLRVYLPKITSMLSDVMKQNYALSLQIEYLSKQLQEISDKLDIINVNVLINSTLTEITPAYQRIKYVNEKFEELTFATETSSKVKKDGSPADILDELTELTELAKSVTKNDVDGFEFYLNTFHDVMVGNNLFGRSALKTASELITKENVKTSGSEVGNVYNFLIVLTALQAKAFLTLTTCRKLLGLADIDYTSIMNEHLNKEKEEFRVNILPTLSNTFSNPNYAKVKGSDEDAKMIVEAKPGHALIGFEISNDSITVLKVYEAKLKQNYQVDKDSLSEVIYGDMDKLLCPDQSEQIYYTNNIVFPNEYVITKIDFTKKMKTLRYEVTANFYDSSTGEIDLNKKKVESSEAEYRTLSANDDGVYMPLGVISETFLTPINGFGLQADENSRLITLTCKSYLRELLLATDLSNKETKLIVPPSGFISNIVENGSIEEDNLEPWKANNKNAYVDHTGGVNGTKALYVHKDGGISQFIGDKLKPKTEYVIQYTVKGKPSIHLKDENTGYIHYEDTNNNLEDYQTINKRFTTGTDLKGVYLILKSQNGDEAWGDNFIILEISPSEKLLSPELINTNNWTSTGSTNISGNTLTLYQGGRGILKQNLQLDSFSTYRVYFSVSGDANVRIRNSREVLFGKRYMSGAKDVSEMFTTKFEKDNFYIELSQGNNLYGGPIVHFYDVSIK

SEQ ID NO: 1482 - protein, 789 aa, Bacillus thuringiensis; identical to SEQ ID NO: 1479

SEQ ID NO: 1483 - protein, 789 aa, Bacillus thuringiensis; identical to SEQ ID NO: 1479

SEQ ID NO: 1484 - protein, 789 aa, Bacillus thuringiensis; identical to SEQ ID NO: 1479

SEQ ID NO: 1485 - protein, 789 aa, Bacillus thuringiensis
MNKNNTKLSTRALPSFIDYFNGIYGFATGIKDIMNMIFKTDTGGDLTLDEILKNQQLLNDISGKLDGVNGSLNDLIAQGNLNTELSKEILKIANEQNQVLNDVNNKLDAINTMLRVYLPKITSMLSDVMKQNYALSLQIEYLSKQLQEISDKLDIINVNVLINSTLTEITPAYQRIKYVNEKFEELTFATETSSKVKKDGSPADILDELTELTELAKSVTKNDVDGFEFYLNTFHDVMVGNNLFGRSALKTASELITKENVKTSGSEVGNVYNFLIVLTALQAKAFLTLTTCRKLLGLADIDYTSIMNEHLNKEKEEFRVNILPTLSNTFSNPNYAKVKGSDEDAKMIVEAKPGHALIGFEISNDSITVLKVYEAKLKQNYQVDKDSLSEVIYGDMDKLLCPDQSEQIYYTNNIVFPNEYVITKIDFTKKMKTLRYEVTANFYDSSTGEIDLNKKKVESSEAEHRTLSANDDGVYMPLGVISETFLTPINGFGLQADENSRLITLTCKSYLRELLLATDLSNKETKLIVPPSGFISNIVENGSIEEDNLEPWKANNKNAYVDHTGGVNGTKALYVHKDGGISQFIGDKLKPKTEYVIQYTVKGKPSIHLKDENTGYIHYEDTNNNLEDYQTINKRFTTGTDLKGVYLILKSQNGDEAWGDNFIILEISPSEKLLSPELINTNNWTSTGSTNISGNTLTLYQGGRGILKQNLQLDSFSTYRVYFSVSGDANVRIRNSREVLFEKRYMSGAKDVSEMFTTKFEKDNFYIELSQGNNLYGGPIVHFYDVSIK

SEQ ID NO: 1486 - protein, 789 aa, Bacillus thuringiensis
MNKNNTKLSTRALPSFIDYFNGIYGFATGIKDIMNMIFKTDTGGDLTLDEILKNQQLLNDISGKLDGVNGSLNDLIAQGNLNTELSKEILKIANEQNQVLNDVNNKLDAINTMLRVYLPKITSMLSDVMKQNYALSLQIEYLSKQLQEISDKLDIINVNVLINSTLTEITPAYQRIKYVNEKFEELTFATETSSKVKKDGSPADILDELTELTGLAKSVPKNDVDGFEFYLNTFHDVMVGNNLFGRSALKTASELITKENVKTSGSEVGNVYNSLIVLTLLQAKAFLTLTTCRKLLGLADIDYTSIMNEHLNKEKEEFRVNIPPTLSNTFSNPNYAKVKGSDEDAKMIVEAKPGHALVGFEISNDSITVLKVYEAKLKQNYQVDKDSLSEVIYGDMDKLLGPDQSGPIYYPNNIVFPNEYVITKIDFTKKMKTLRYEVTANFYDSSTGEIDLNKKKVESSEAEYRTLSANDDGVYMPLGVISETFLTPINGFGLQADENSRLITLTCKSYLRELLLATDLSNKETKLIVPPSGFIKNIVENGSIEEDNLEPWKANNKNAYVDHTGGVNGTKALYVHKDGGISQFIGDKLKPKTEYVIQYTVKGKPSIHLKDENTGYIHYEDTNNNLEDYQTITKRFTTGTDLKGVYLILKSQNGDEAWGDNFIILEISPSEKLLSPELINTNNWTSTGSTNISGNTLTLYQGGRGILKQNLQLDSFSTYRVYFSVSGDANVRIRNSREVLFEKRYMSGAKDVSEIFTTKLGKDNFYIELSQGNNLNGGPIVKFYDVSIK

SEQ ID NO: 1487 - protein, 789 aa, Bacillus thuringiensis; identical to SEQ ID NO: 1479

SEQ ID NO: 1488 - protein, 789 aa, Bacillus thuringiensis
MNKNNTKLSTRALPSFIDYFNGIYGFATGIKDIMNMIFKTDTGGDLTLDEILKNQQLLNDISGKLDGVNGSLNDLIAQGNLNTELSKEILKIANEQNQVLNDVNNKLDAINTMLRVYLPKLTSMLSDVMKQNYALSLQIEYLSKQLQEISDKLDIINVNVLINSTLTEITPAYQRIKYVNEKFEELTFATETSSKVKKDGSPADILDELTELTELAKSVTKNDVDGFEFYLNTFHDVMVGNNLFGRSALKTASELITKENVKTSGSEVGNVYNFLIVLTALQAKAFLTLTTCRKLLGLADIDYTSIMNEHLNKEKEEFRVNILPTLSNTFSNPNYAKVKGSDEDAKMIVEAKPGHALIGFEISNDSITVLKVYEAKLKQNYQVDKDSLSEVIYGDMDKLLCPDQSEQIYYTNNIVFPNEYVITKIDFTKKMKTLRYEVTANFYDSSTGEIDLNKKKVESSEAEYRTLSANDDGVYMPLGVISETFLTPINGFGLQADENSRLITLTCKSYLRELLLATDLSNKETKLIVPPSGFISNIVENGSIEEDNLEPWKANNKNAYVDHTGGVNGTKALYVHKDGGISQFIGDKLKPKTEYVIQYTVKGKPSIHLKDENTGYIHYEDTNNNLEDYQTINKRFTTGTDLKGVYLILKSQNGDEAWGDNFIILEISPSEKLLSPELINTNNWTSTGSTNISGNTLTLYQGGRGILKQNLQLDSFSTYRVYFSVSGDANVRIRNSREVLFEKRYMSGAKDVSEMFTTKFEKDNFYIELSQGNNLYGGPIVHFYDVSIK

SEQ ID NO: 1489 - protein, 790 aa, Bacillus thuringiensis; identical to SEQ ID NO: 1478

SEQ ID NO: 1490 - protein, 789 aa, Bacillus thuringiensis
MNKNNTKLSTRALPSFIDYFNGIYGFATGIKDIMNMIFKTDTGGDLTLDEILKNQQLLNDISGKLDGVNGSLNDLIAQGNLNTELSKEILKIANEQNQVLNDVNNKLDAINTMLRVYLPKITSMLSDVMKQNYALSLQIEYLSKQLQEISDKLDIINVNVLINSTLTEITPAYQRIKYVNEKFEELTFATETSSKVKKDGSPADILDELTELTELAKSVTKNDVDGFEFYLNTFHDVMVGNNLFGRSALKTASELITKENVKTSGSEVGNVYNFLIVLTALQAKAFLTLTTCRKLLGLADIDYTSIMNEHLNKEKEEFRVNILPTLSNTFSNPNYAKVKGSDEDAKMIVEAKPGHALIGFEISNDSITVLKVYEAKLKQNYQVDKDSLSEVIYGDMDKLLCPDQSEQIYYTNNIVFPNEYVITKIDFTKKMKTLRYEVTANFYDSSTGEIDLNKKKVESSEAEYRTLSANDDGVYMPLGVISETFLTPINGFGLQADENSRLITLTCKSYLRELLLATDLSNKETKLIVPPSGFISNIVENGSIEEDNLEPWKANNKNAYVDHTGGVNGTKALYVHKDGGISQFIGDKLKPKTEYVIQYTVKGKTSIHLKDENTGYIHYEDTNNNLEDYQTINKRFTTGTDLKGVYLILKSQNGDEAWGDNFIILEISPSEKLLSPELINTNNWTSTGSTNISGNTLTLYQGGRGILKQNLQLDSFSTYRVYFSVSGDANVRIRNSREVLFEKRYMSGAKDVSEMFTTKFEKDNFYIELSQGNNLYGGPIVHFYDVSIK

SEQ ID NO: 1491 - protein, 789 aa, Bacillus thuringiensis
MNKNNTKLNARALPSFIDYFNGIYGFATGIKDIMNMIFKTDTGGNLTLDEILKNQQLLNEISGKLDGVNGSLNDLIAQGNLNTELSKEILKIANEQNQVLNDVNNKLDAINTMLHIYLPKITSMLSDVMKQNYALSLQIEYLSKQLQEISDKLDIINVNVLINSTLTEITPAYQRIKYVNEKFEELTFATETTLKVKKDSSPADILDELTELTELAKSVTKNDVDGFEFYLNTFHDVMVGNNLFGRSALKTASELIAKENVKTSGSEVGNVYNFLIVLTALQAKAFLTLTTCRKLLGLADIDYTSIMNEHLNKEKEEFRVNILPTLSNTFSNPNYAKVKGSDEDAKMIVEAKPGYALVGFEMSNDSITVLKVYEAKLKQNYQVDKDSLSEVIYGDTDKLLCPDQSEQIYYTNNIVFPNEYVITKIDFTKKMKTLRYEVTANFYDSSTGEIDLNKKKVESSEAEYRTLSANDDGVYMPLGVISETFLTPINGFGLQADGNSRLITLTCKSYLRELLLATDLSNKETKLIVPPSGFISNIVENGSIEEDNLEPWKANNKNAYVDHTGGVNGTKALYVHKDGGFSQFIGDKLKPKTEYVIQYTVKGKPSIHLKDENTGYIHYEDTNNNLKDYQTITKRFTTGTDLKGVYLILKSQNGDEAWGDNFIILEISPSEKLLSPELINTNNWTSTGSTHISGNTLTLYQGGRGILKQNLQLDSFSTYRVYFSVSGDANVRIRNSREVLFEKRYMSGAKDVSEMFTTKFEKDNFYIELSQGNNLYGGPIVHFYDVSIK

SEQ ID NO: 1492 - protein, 789 aa, Bacillus thuringiensis; identical to SEQ ID NO: 1473

SEQ ID NO: 1493 - protein, 789 aa, Bacillus thuringiensis
MNKNNTKLSTRALPSFIDYFNGIYGFATGIKDIMNMIFKTDTGGDLTLDEILKNQQLLNDISGKLDGVNGSLNDLIAQGNLNTELSKEILKIANEQNQVLNDVNNKLDAINTMLRVYLPKITSMLSDVIKQNYALSLQIEYLSKQLQEISDKLDIINVNVLINSTLTEITPAYQRIKYVNEKFEELTFATETSSKVKKDGSPADILDELTELTELAKSVTKNDVDGFEFYLNTFHDVMVGNNLFGRSALKTASELITKENVKTSGSEVGNVYNFLIVLTALQAQAFLTLTTCRKLLGLADIDYTSIMNEHLNKEKEEFRVNILPTLSNTFSNPNYAKVKGSDEDAKMIVEAKPGHALIGFEISNDSITVLKVYEAKLKQNYQVDKDSLSEVIYGDMDKLLCPDQSEQIYYTNNIVFPNEYVITKIDFTKKMKTLRYEVTANFYDSSTGEIDLNKKKVESSEAEYRTLSANDDGVYMPLGVISETFLTPINGFGLQADENSRLITLTCKSYLRELLLATDLSNKETKLIVPPSGFISNIVENGSIEEDNLEPWKANNKNAYVDHTGGVNGTKALYVHKDGGISQFIGDKLKPKTEYVIQYTVKGKPSIHLKDENTGYIHYEDTNNNLEDYQTINKRFTTGTDLKGVYLILKSQNGDEAWGDNFIILEISPSEKLLSPELINTNNWTSTGSTNISGNTLTLYQGGRGILKQNLQLDSFSTYRVYFSVSGDANVRIRNSREVLFEKRYMSGAKDVSEMFTTKFEKDNFYIELSQGNNLYGGPIVHFYDVSIK

SEQ ID NO: 1494 - protein, 789 aa, Bacillus thuringiensis; identical to SEQ ID NO: 1479

SEQ ID NO: 1495 - protein, 789 aa, Bacillus thuringiensis
MNKNNTKLSTRALPSFIDYFNGIYGFATGIKDIMNMIFKTDTGGDLTLDEILKNQQLLNDISGKLDGVNGSLNDLIAQGNLNTELSKEILKIANEQNQVLNDVNNKLDAINTMLRVYLPKITSMLSDVMKQNYALSLQIEYLSKQLQEISDKLDIINVNVLINSTLTEITPAYQRIKYVNEKFEELTFATETSSKVKKDGSPADILDELTELTELAKSVTKNDVDGFEFYLNTFHDVMVGNNLFGRSALKTASELITKENVKTSGSEVGNVYNFLIVLTALQAKAFLTLTTCRKLLGLADIDYTSIMNEHLNKEKEEFRVNILPTLSNTFSNPNYAKVKGSDEDAKMIVEAKPGHALIGFEISNDSITVLKVYEAKLKQNYQVDKDSLSEVIYGDMDKLLCPDQSEQIYYTNNIVFPNGYVITKIDFTKKMKTLRYEVTANFYDSSTGEIDLNKKKVESSEAEYRTLSANDDGVYMPLGVISETFLTPINGFGLQADENSRLITLTCKSHLRELLLATDLSNKETKLIVPPSGFISNIVENGSIEEDNLEPWKANNKNAYVDHTGGVNGTKALYVHKDGGISQFIGDKLKPKTEYVIQYTVKGKPSIHLKDENTGYIHYEDTNNNLEDYQTINKRFTTGTDLKGVYLILKSQNGDEAWGDNFIILEISPSEKLLSPELINTNNWTSTGSTNISGNTLTLYQGGRGILKQNLQLDSFSTYRVYFSVSGDANVRIRNSREVLFEKRYMSGAKDVSEMFTTKFEKDNFYIELSQGNNLYGGPIVHFYDVSIK

SEQ ID NO: 1496 - protein, 789 aa, Bacillus thuringiensis
MNKNNTKLSTRALPGFIDYFNGIYGFATGIKDIMNMIFKTDTGGDLTLDEILKNQQLLNDISGKLDGVNGSLNDLIAQGNLNTELSKEILKIANEQNQVLNDVNNKLDAINTMLRVYLPKITSMLSDVMKQNYALSLQIEYLSKQLQEISDKLDIINVNVLINSTLTEITPAYQRIKYVNEKFEELAFATETSSKVKKDGSPADILDELTELTELAKSVTKNDVDGFEFYLNTFHDVMVGNNLFGRSALKTASELITKENVKTSGSGVGNVYNFLIVLTALQAKAFLTLTTCRKLLGLADIDYTSIMNEHLNKEKEEFRVNILPTLSNTFSNPNYAKVKGSDEDAKMIVEAKPGHALIGFEISNDSITVLKVYEAKLKQNYQVDKDSLSEVIYGDMDKLLCPDQSEQIYYTNNIVFPNEYVITKIDFTKKMKTLRYEVTANFYDSSTGEIDLNKKKVESSEAEYRTLSANDDGVYMPLGVISETFLTPINGFGLQADENSRLITLTCKSYLRELLLATDLSNKETKLIVPPSGFISNIVENGSIEEDNLEPWKANNKNAYVDHTGGVNGTKALYVHKDGGISQFIGDKLKPKTEYVIQYTVKGKPSIHLKDENTGYIHYEDTNNNLEDYQTINKRFTTGTDLKGVYLILKSQNGDEAWGDNFIILEISPSEKLLSPELINTNNWTSTGSTNISGNTLTLYQGGRGILKQNLQLDSFSTYRVYFSVSGDANVRIRNSREVLFEKRYMSGAKDVSEMFTTKFEKDNFYIELSQGNNLYGGPIVHFYDVSIK

SEQ ID NO: 1497 - protein, 789 aa, Vip3Aa24
MNKNNTKLSTRALPSFIDYFNGIYGFATGIKDIMNMIFKTDTGGDLTLDEILKNQQLLNDISGKLDGVNGSLNDLIAQGNLNTKLSKEILKIANEQNQVLNDVNNKLDAINTMLRVYLPKITSMLSDVMKQNYALSLQIKYLSKQLQEISDKLDIINVNVLINSTLTEITPAYQRIKYVNEKFEELTFATETSSKVKKDGSPADILDELTELTELAKSVTKNDVDGFEFYLNTFHDVMVGNNLFGRSALKTASELITKENVKTSGSEVGNVYNFLIVLTALQAKAFLTLTTCRKLLGLADIDYTSIMNEHLNKEKEEFRVNILPTLSNTFSNPNYAKVKGSDEDAKMIVEAKPGHALIGFEISNDSITVLKVYEAKLKQNYQADKDSLSEVIYGDMDKLLCPDQSEQIYYTNNIVFPNEYVITKIDFTKKMKTLRYEVTANFYDSSTGEIDLNKKKVESSEAEYRTLSANDDGVYMPLGVISETFLTPINGFGLQADENSRLITLTCKSYLRELLLATDLSNKETKLIVPPSGFISNIVENGSIEEDNLEPWKANNKNAYVDHTGGVNGTKALYVHKDGGISQFIGDKLKPKTEYVIQYTVKGKPSIHLKDENTGYIHYEDTNNNLEDYQTINKRFTTGTDLKGVYLILKSQNGDEAWGDNFIILEISPSEKLLSPELINTNNWTSTGSTNISGNTLTLYQGGRGILKQNLQLDSFSTYRVYFSVSGDANVRIRNSREVLFEKRYMSGAKDVSEMFTTKFEKDNFYIELSQGNNLYGGPIYHLHDVSIK

SEQ ID NO: 1498 - protein, 789 aa, Bacillus thuringiensis; identical to SEQ ID NO: 1497

SEQ ID NO: 1499 - protein, 789 aa, Bacillus thuringiensis
MNKNNTKLSTRALPSFIDYFNGIYGFATGIKDIMNMIFKTDTGGDLTLDEILKNQQLLNDISGKLDGVNGSLNDLIAQGNLNTELSKEILRIANEQNQVLNDVNNKLDAINTMLRVYLPKITSMLSDVMKQNYALSLQIEYLSKQLQEISDKLDIINVNVLINSTLTEITPAYQRIKYVNEKFEELTFATETSSKVKKDGSPADILDELTELTELAKSVTKNDVDGFEFYLNTFHDVMVGNNLFGRSALKTASELITKENVKTSGSEVGNVYNFLIVLTALQAKAFLTLTTCRKLLGLADIDYTSIMNEHLNKEKEEFRVNILPTLSNTFSNPNYAKVKGSNEDAKMIVEAKPGHALIGFEISNDSITVLKVYEAKLKQNYQVDKDSLSEVIYGDMDKLLCPDQSEQIYYTNNIVFPNEYVITKIDFTKKMKTLRYEVTANFYDSSTGEIDLNKKKVESSEAEYRTLSANDDGVYMPLGVISETFLTPINEFGLQADENSRLITLTCKSYLREPLLATDLSNKETKLIVPPSGFISNIVENGSIEEDNLEPWKANNKNAYVDHTGGVNGTKALYVHKDGGISQFIGDKLKPKTEYVIQYTVKGKPSIRLKDENTGYIHYEDTNNNLEDYQTINKRFTTGADLKGVYLILKSQNGDEAWGDNFIILEISPSEKLLSPELINTNNWTSTGSTNISGNTLTLYQGGRGILKQNLQLDSFSTYRVYFSVSGDANVRIRNSREVLFEKRYMSGAKDVSEMFTTKFEKDNFYTELSQGNNLYGGPIVHFYDVSIK

SEQ ID NO: 1500 - protein, 789 aa, Bacillus thuringiensis
MNKNNTKLSTRALPSFIDYFNGIYGFATGIKDIMNMIFKTDTGGDLTLDEILKNQQLLNDISGKLDGVNGSLNDLIAQGNLNTELSKEILKIANEQNQVLNDVNNKLDAINTMLRVYLPKITSMLSDVMKQNYALSLQIEYLSKQLQEISDKLDIINVNVLINSTLTEITPAYQRIKYVNEKFEELTFATETSSKVKKDGSPADILDELTELTELAKSVTKNGVDGFEFYLNTFHDVMVGNNLFGRSALKTASELITKENVKTSGSEVGNVYNFLIVLTALQAKAFLTLTTCRKLLGLADIDYTSIMNEHLNKEKEEFRVNILPTLSNTFSNPNYAKVKGSDEDAKMIVEAKPGHALIGFEISNDSITVLKVYEAKLKQNYQVDKDSLSEVIYGDMDELLCPDQSEQIYYTNNIVFPNEYVITKIDFTKKMKTLRYEVTANFYDSSTGEIDLNKKKVESSEAEYRTLSANDDGVYMPLGVISETFLTPINGFGLQADENSRLITLTCKSYLRELLLATDLSNKETKLIVPPSGFISNIVENGSIEEDNLEPWKANNKNAYVDHTGGVNGTKALYVHKDGGISQFIGDKLKPKTEYVIQYTVKGKPSIHLKDENTGYIHYEDTNNNLEDYQTINKRFTTGTDLKGVYLILKSQNGDEAWGDNLIILEISPSEKLLSPELINTNNWTSTGSTNISGNTLTLYQGGRGILKQNLQLDSLSTYRVYFSVSGDANVRIRNSREVLFEKRYMSGAKDVSEMFTTKFEKDNFYIELSQGNNLYGGPIVHFYDVSIK

SEQ ID NO: 1501 - protein, 789 aa, Bacillus thuringiensis
MNKNNTKLSTRALPSFIDYFNGIYGFATGIKDIMNMIFKTDTGGDLTLDEILKNQQLLNDISGKLDGVNGSLNDLIAQGNLNTELSKEILKIANEQNQVLNDVNNKLDAINTMLRVYLPKITSMLSDVMKQNYALSLQIEYLSKQLQEISDKLDIINVNVLINSTLTEITPAYQRIKYVNEKFEELTFATETSSKVKKDGSPADILDELTELTELAKSVTKNDVDGFEFYLNTFHDVMVGNNLFGHSALKTASELITKENVKTSGSEVGNVYNFLIVLTALQAKAFLTLTTCRKLLGLADIDYTSIMNEHLNKEKEEFRVNILPTLSNTFSNPNYAKVKGSDEDAKMIVEAKPGHALIGFEISNDSITVLKVYEAKLKQNYQVDKDSLSEVIYGDMDKLLCPDQSEQIYYTNNIVFPNEYVITKIDFTKKMKTLRYEVTANFYDSSTGEIDLNKKKVESSEAEYRTLSANDDGVYMPLGVISETFLTPINGFGLQADENSRLITLTCKSYLRELLLATDLSNKETKLIVPPSGFISNIVENGSIEEDNLEPWKANNKNAYVDHTGGVNGTKALYVHKDGGISQFIGDKLKPKTEYVIQYTVKGKPSIHLKDENTGYIHYEDTNNNLEDYQTINKRFTTGTDLKGVYLILKSQNGDEAWGDNFIILEISPSEKLLSPELINTNNWTSTGSTNISGNTLTLYQGGRGILKQNLQLDSFSTYRVYFSVSGDANVRIRNSREVLFEKRYMSGAKDVSEMFTTKFEKDNFYIELSQGNNLYGGPIVHFYDVSIS

SEQ ID NO: 1502 - protein, 788 aa, Bacillus thuringiensis
MNKNNTKLSNFRCLYLVEYFNGIYGFATGIKDIMNMIFKTDTGGDLTLDEILKNQQLLNDISGKLDGVNGSLNDLIAQGNLNTELSKEILKIANEQNQVLNDVNNKLDAINTMLRVYLPKITSMLSDVMKQNYALSLQIEYLSKQLQEISDKLDIINVNVLINSTLTEITPAYQRIKYVNEKFEELTFATETSSKVKKDGSPADILDELTELTELAKSVTKNDVDGFEFYLNTFHDVMVGNNLFGRSALKTASELITKENVKTSGSEVGNVYNFLIVLTALQAKAFLTLTTCRKLLGLADIDYTSIMNEHLNKEKEEFRVNILPTLSNTFSNPNYAKVKGSDEDAKMIVEAKPGHALIGFEISNDSITVLKVYEAKLKQNYQVDKDSLSEVIYGDMDKLLCPDQSEQIYYTNNIVFPNEYVITKIDFTKKMKTLRYEVTANFYDSSTGEIDLNKKKVESSEAEYRTLSANDDGVYMPLGVISETFLTPINGFGLQADENSRLITLTCKSYLRELLLATDLSNKETKLIVPPSGFISNIVENGSIEEDNLEPWKANNKNAYVDHTGGVNGTKALYVHKDGGISQFIGDKLKPKTEYVIQYTVKGKPSIHLKDENTGYIHYEDTNNNLEDYQTINKRFTTGTDLKGVYLILKSQNGDEAWGDNFIILEISPSEKLLSPELINTNNWTSTGSTNISGNTLTLYQGGRGILKQNLQLDSFSTYRVYFSVSGDANVRIRNSREVLFEKRYMSGAKDVSEMYTPKFEKDNFYIELLKAKNKNKLIALFYDVSIK

SEQ ID NO: 1503 - protein, 787 aa, Bacillus thuringiensis
MNKNNTKLSHVVVISFIDYFNGIYGFATGIKDIMNMIFKTDTGGDLTLDEILKNQQLLNDISGKLDGVNGSLNDLIAQGNLNTELSKEILKIANEQNQVLNDVNNKLDAINTMLRVYLPKITSMLSDVMKQNYALSLQIEYLSKQLQEISDKLDIINVNVLINSTLTEITPAYQRIKYVNEKFEELTFATETSSKVKKDGSPADILDELTELTELAKSVTKNDVDGFEFYLNTFHDVMVGNNLFGRSALKTASELITKENVKTSGSEVGNVYNFLIVLTALQAKAFLTLTTCRKLLGLADIDYTSIMNEHLNKEKEEFRVNILPTLSNTFSNPNYAKVKGSDEDAKMIVEAKPGHALIGFEISNDSITVLKVYEAKLKQNYQVDKDSLSEVIYGDMDKLLCPDQSEQIYYTNNIVFPNEYVITKIDFTKKMKTLRYEVTANFYDSSTGEIDLNKKKVESSEAEYRTLSANDDGVYMPLGVISETFLTPINGFGLQADENSRLITLTCKSYLRELLLATDLSNKETKLIVPPSGFISNIVENGSIEEDNLEPWKANNKNAYVDHTGGVNGTKALYVHKDGGISQFIGDKLKPETEYVIQYTVKGKPSIHLKDENTGYIPYEDTNNNLEDYQTINKRFTTGTDLKGVYLILKSQNGDEAWGDNFIILEISPSEKLLSPELINTNNWTSTGSTNISGNTLTLYQGGRGILKQNLQLDSFSTYRVYFSVSGDANVRIRNSREVLFEKRYMSGAKDVSEMFTTKFEKDNFYIEPLKGITIWVNSPFYDVSIK

SEQ ID NO: 1504 - protein, 788 aa, Bacillus thuringiensis
MNKNNTKLSNVNELSSLSDYFNGIYGFATGIKDIMNMIFKTDTGGDLTLDEILKNQQLLNDISGKLDGVNGSLNDLIAQGNLNTELSKEILKIANEQNQVLNDVNNKLDAINTMLRVYLPKITSMLSDVMKQNYALSLQIEYLSKQLQEISDKLDIINVNVLINSTLTEITPAYQRIKYVNEKFEELTFATETSSKVKKDGSPADILDELTELTELAKSVTKNDVDGFEFYLNTFHDVMVGNNLFGRSALKTASELITKENVKTSGSEVGNVYNFLIVLTALQAKAFLTLTTCRKLLGLADIDYTSIMNEHLNKEKEEFRVNILPTLSNTFSNPNYAKVKGSDEDAKMIVEAKPGHALIGFEISNDSITVLKVYEAKLKQNYQVDKDSLSEVIYGDMDKLLCPDQSEQIYYTNNIVFPNEYVITKIDFTKKMKTLRYEVTANFYDSSTGEIDLNKKKVESSEAEYRTLSANDDGVYMPLGVISETFLTPINGFGLQADENSRLITLTCKSYLRELLLATDLSNKETKLIVPPSGFISNIVENGSIEEDNLEPWKANNKNAYVDHTGGVNGTKALYVHKDGGISQFIGDKLKPKTEYVIQYTVKGKPSIHLKDENTGYIHYEDTNNNLEDYQTINKRFTTGTDLKGVYLILKSQNGDEAWGDNFIILEISPSEKLLSPELINTNNWTSTGSTNISGNTLTLYQGGRGILKQNLQLDSFSTYRVYFSVSGDANVRIRNSREVLFEKRYMSGAKDVSEMFTTKFEKDNFYIELLKGRTRIDLSPFYDVSIK

SEQ ID NO: 1505 - protein, 788 aa, Bacillus thuringiensis
MNKNNTKLSKNELSRLSDYFNGIYGFATGIKDIMNMIFKTDTGGDLTLDEILKNQQLLNDISGKLDGVNGSLNDLIAQGNLNTELSKEILKIANEQNQVLNDVNNKLDAINTMLRVYLPKITSMLSDVMKQNYALSLQIEYLSKQLQEISDKLDIINVNVLINSTLTEITPAYQRIKYVNEKFEELTFATETSSKVKKDGSPADILDELTELTELAKSVTKNDVDGFEFYLNTFHDVMVGNNLFGRSALKTASELITKENVKTSGSEVGNVYNFLIVLTALQAKAFLTLTTCRKLLGLADIDYTSIMNEHLNKEKEEFRVNILPTLSNTFSNPNYAKVKGSDEDAKMIVEAKPGHALIGFEISNDSITVLKVYEAKLKQNYQVDKDSLSEVIYGDMDKLLCPDQSEQIYYTNNIVFPNEYVITKIDFTKKMKTLRYEVTANFYDSSTGEIDLNKKKVESSEAEYRTLSANDDGVYMPLGVISETFLTPINGFGLQADENSRLITLTCKSYLRELLLATDLSNKETKLIVPPSGFISNIVENGSIEEDNLEPWKANNKNAYVDHTGGVNGTKALYVHKDGGISQFIGDKLKPKTEYVIQYTVKGKPSIHLKDENTGYIHYEDTNNNLEDYQTINKRFTTGTDLKGVYLILKSQNGDEAWGDNFIILEISPSEKLLSPELINTNNWTSTGSTNISGNTLTLYQGGRGILKQNLQLDSFSTYRVYFSVSGDANVRIRNSREVLFEKRYMSGAKDVSEMFTTKFEKDNFYIELSQGKNKNRLNGPFYDVSIK

SEQ ID NO: 1506 - protein, 789 aa, Bacillus thuringiensis; identical to SEQ ID NO: 1479

SEQ ID NO: 1507 - protein, 789 aa, Bacillus thuringiensis; identical to SEQ ID NO: 1479

SEQ ID NO: 1508 - protein, 789 aa, Bacillus thuringiensis
MNKNNTKLSTRALPSFIDYFNGIYGFATGIKDIMNMIFKTDTGGDLTLDEILKNQQLLNDISGKLDGVNGSLNDLIAQGNLNTELSKEILKIANEQNQVLNDVNNKLDAINTMLRVYLPKITSMLSDVMKQNYALSLQIEYLSKQLQEISDKLDIINVNVLINSTLTEITPAYQRIKYVNEKFEELTFATETSSKVKKDGSPADILDELTELTELAKSVTKNDVDGFEFYLNTFHDVMVGNNLFGRSALKTASELITKENVKTSGSEVGNVYNFLIVLTALQAKAFLTLTTCRKLLGLADIDYTSIMNEHLNKEKEEFRVNILPTLSNTFSNPNYAKVKGSDEDAKMIVEAKPGHALVGFEISNDSITVLKVYEAKLKQNYQVDKDSLSEVIYGDMDKLLCPDQSEQIYYTNNIVFPNEYVITKIDFTKKMKTLRYEVTANFYDSSTGEIDLNKKKVESSEAEYRTLSANDDGVYMPLGVISETFLTPINGFGLQADENSRLITLTCKSYLRELLLATDLSNKETKLIVPPSGFIKNIVENGSIEEDNLEPWKANNKNAYVDHTGGVNGTKALYVHKDGGISQFIGDKLKPKTEYVIQYTVKGKPSIHLKDENTGYIHYEDTNNNLEDYQTITKRFTTGTDLKGVYLILKSQNGDEAWGDNFIILEISPSEKLLSPELINTNNWTSTGSTNISGNTLTLYQGGRGILKQNLQLDSFSTYRVYFSVSGDANVRIRNSREVLFEKRYMSGAKDVSEIFTTKLGKDNFYIELSQGNNLNGGPIVKFSDVSIK

SEQ ID NO: 1509 - protein, 789 aa, Bacillus thuringiensis; identical to SEQ ID NO: 1479

SEQ ID NO: 1510 - protein, 789 aa, Bacillus thuringiensis; identical to SEQ ID NO: 1479

SEQ ID NO: 1511 - protein, 789 aa, Bacillus thuringiensis
MNMNNTKLNARALPSFIDYFNGIYGFATGIKDIMNMIFKTDTGGDLTLDEILKNQQLLNDISGKLDGVNGSLNDLIAQGNLNTELSKEILKIANEQNQVLNDVNNKLDAINTMLRVYLPKITSMLSDVMKQNYALSLQIEYLSKQLQEISDKLDIINVNVLINSTLTEITPAYQRIKYVNEKFEELTFATETSSKVKKDGSPADILDELTELTELAKSVTKNDVDGFEFYLNTFHDVMVGNNLFGRSALKTASELITKENVKTSGSEVGNVYNFLIVLTALQAKAFLTLTTCRKLLGLADIDYTSIMNEHLNKEKEEFRVNILPTLSNTFSNPNYAKVKGSDEDAKMIVEAKPGHALVGFEVSNDSITVLKVYEAKLKQNYQVDKDFLSEVIYGDMDKLLCPDQSEQIYYTNNIVFPNEYVITKIDFTKKMKTLRYEVTANFYDSSTGEIDLNKKKVESSEAEYRTLSANDDGVYMPLGVISETFLTPINGFGLQADENSRLITLTCKSYLRELLLATDLSNKETKLIVPPSGFISNIVENGSIEEDNLEPWKANNKNAYVDHTGGVNGTKALYVHKDGGISQFIGDKLKPKTEYVIQYTVKGKPSIHLKDENTGYIHYEDTNNNLEDYQTITKRFTTGTDLKGVYLILKSQNGDEAWGDNFIILEISPSEKLLSPELINTNNWTSTGSTNISGNTLTLYQGGRGILKQNLQLDSFSTYRVYFSVSGDANVRIRNSREVLFEKRYMSGAKDVSEMFTTKFEKDNFYIELSQGNNLYGGPIVHFYDVSIK

SEQ ID NO: 1512 - protein, 789 aa, Bacillus thuringiensis
MNMNNTKLNARALPSFIDYFNGIYGFATGIKDIMNMIFKTDTGGNLTLDEILKNQQLLNEISGKLDGVNGSLNDLIAQGNLNTELSKEILKIANEQNQVLNDVNNKLDAINTMLHIYLPKITSMLSDVMKQNYALSLQIEYLSKQLQEISDKLDIINVNVLINSTLTEITPAYQRIKYVNEKFEELTFATETTLKVKKDSSPADILDELTELTELAKSVTKNDVDGFEFYLNTFHDVMVGNNLFGRSALKTASELIAKENVKTSGSEVGNVYNFLIVLTALQAKAFLTLTTCRKLLGLADIDYTSIMNEHLNKEKEEFRVNILPTLSNTFSNPNYAKVKGSDEDAKMIVEAKPGHALVGFEMSNDSITVLKVYEAKLKQNYQVDKDSLSEVIYGDMDKLLCPDQSEQIYYTNNIVFPNEYVITKIDFTKKMKTLRYEVTANSYDSSTGEIDLNKKKVESSEAEYRTLSAKDDGVYMPLGVISETFLTPINGFGLQADENSRLITLTCKSYLRELLLATDLSNKETKLIVPPSGFISNIVENGNLEGENLEPWIANNKNAYVDHTGGVNGTRALYVHKDGGFSQFIGDKLKPKTEYVIQYTVKGKPSIHLKNENTGYIHYEDTNNNLEDYQTITKRFTTGTDLKGVYLILKSQNGDEAWGDNFTILEISPSEKLLSPELINVNNWIRTGSTHISGNTLTLYQGGGGNLKQNLQLDSFSTYRVNFSVTGDANVRIRNSREVLFEKRYMSGAKDVSEIFTTKLGKDNFYIELSQGNNLYGGPLVKFNDVSIK

SEQ ID NO: 1513 - protein, 789 aa, Bacillus thuringiensis
MNKNNTKLSARALPSFIDYFNGIYGFATGIKDIMNMIFKTDTGGNLTLDEILKNQQLLNEISGKLDGVNGSLNDLIAQGNLNTELSKEILKIANEQNQVLNDVNNKLDAINTMLHIYLPKITSMLSDVMKQNYALSLQIEYLSKQLQEISDKLDIINVNVLINSTLTEITPAYQRIKYVNEKFEELTFATETTLKVKKDSSPADILDELTELTELAKSVTKNDVDGFEFYLNTFHDVMVGNNLFGRSALKTASELIAKENVKTSGSEVGNVYNFLIVLTALQAKAFLTLTTCRKLLGLADIDYTSIMNEHLNKEKEEFRVNILPTLSNTFSNPNYAKVKGSDEDAKMIVEAKPGHALVGFEMSNDSITVLKVYEAKLKQNYQVDKDSLSEVIYGDMDKLLCPDQSEQIYYTNNIVFPNEYVITKIDFTKKMKTLRYEVTANSYDSSTGEIDLNKKKVESSEAEYRTLSAKDDGVYMPLGVISETFLTPINGFGLQADENSRLITLTCKSYLRELLLATDLSNKETKLIVPPSGFISNIVENGNLEGENLEPWIANNKNAYVDHTGGVNGTRALYVHKDGGFSQFIGDKLKPKTEYVIQYTVKGKPSIHLKNENTGYIHYEDTNNNLEDYQTITKRFTTGTDLKGVYLILKSQNGDEAWGDNFTILEISPSEKLLSPELINVNNWIRTGSTHISGNTLTLYQGGGGNLKQNLQLDSFSTYRVNFSVTGDANVRIRNSREVLFEKRYMSGAKDVSEIFTTKLGKDNFYIELSQGNNLYGGPLVHFYDVSIK

SEQ ID NO: 1514 - protein, 789 aa, Bacillus thuringiensis
MNMNNTKLSARALPSLIDYFNGIYGFATGIKDIMNMIFKTDTGGNLTLDEILKNQQLLNEISGKLDGVNGSLNDLIAQGNLNTELSKEILKIANEQNQVLNDVNNKLDAINTMLHIYLPKITSMLSDVMKQNYALSLQIEYLSKQLQEISDKLDIINVNVLINSTLTEITPAYQRIKYVNEKFEELTFATETTLKVKKDSSPADILDELTELTELAKSVTKNDVDGFEFYLNTFHDVMVGNNLLGRSALKTASELIAKENVKTSGSEVGNVYNFLIVLTALQAKAFLTLTTCRKLLGLADIDYTSIMNEHLNKEKEEFRVNILPTLSNTFSNPNYAKVKGSDEDAKMIVEAKPGHALVGFEMSNDSITVLKVYEAKLKQNYQVDKDSLSEVIYGDMDKLLCPDQSEQIYYTNNIVFPNEYVITKIDFTKKMKTLRYEVTANSYDSSTGEIDLNKKKVESSEAEYRTLSAKDDGVYMPLGVISETFLTPINGFGLQADENSRLITLTCKSYLRELLLATDLSNKETKLIVPPSGFISNIVENGNLEGENLEPWIANNKNAYVDHTGGVNGTRALYVHKDGGFSQSIGDKLKPKTEYVIQYTVKGKPSIHLKNENTGYIHYEDTNNNLEDYQTITKRFTTGTDLKGVYLILKSQNGDEAWGDNFTILEISPSEKLLSPELINVNNWIRTGSTHISGYTLTLYQGGGGNLKQNLQLDSFSTYRVNFSVTGDANVRIRNSREVLFEKRYMSGAKDVSEIFTTKLGKDNFYIELSQGNNLYGGPLVHFYDVSIK

SEQ ID NO: 1515 - protein, 789 aa, Bacillus thuringiensis
MNKNNTKLSTRALPSFIDYFNGIYGFATGIKDIMNMIFKTDTGGDLTLDEILKNQQLLNDISGKLDGVNGSLNDLIAQGNLNTELSKEILKIANEQNQVLNDVNNKLDAINTMLRVYLPKITSMLSDVMKQNYALSLQIEYLSKQLQEISDKLDIINVNVLINSTLTEITPAYQRIKYVNEKFEELTFATETSSKVKKDGSPADILDELTELTELAKSVTKNDVDGFEFYLNTFHDVMVGNNLFGRSALKTASELITKENVKTSGSEVGNVYNFLIVLTALQAKAFLTLTTCRKLLGLADIDYTSIMNEHLNKEKEEFRVNILPTLSNTFSNPNYAKVKGSDEDAKMIVEAKPGHALVGFEISNDSITVLKVYEAKLKQNYQVDKDSLSEVIYGDMDKLLCPDQSEQIYYTNNIVFPNEYVITKIDFTKKMKTLRYEVTANFYDSSTGEIDLNKKKVESSEAEYRTLSANDDGVYMPLGVISEAFLTPINGFGLQADENSRLITLTCKSYLRELLLATDLSNKETKLIVPPSGFIKNIVENGSIEEDNLEPWKANNKNAYVDHTGGVNGTKALYVHKDGGISQFIGDKLKPKTEYVIQYTVKGKPSIHLKDENTGYIHYEDTNNNLEDYQTITKRFTTGTDLKGVYLILKSQNGDEAWEDNFIILEISPSEKLLSPELINTNNWTSTGSTNISGNTLTLYQGGRGILKQNLQLDSFSTYRVYFSVSGDANVRIRNSREVLFEKRYMSGAKDVSEIFTTKLGKDNFYIELSQGNNLNGGPIVKFSDVSIK

SEQ ID NO: 1516 - protein, 789 aa, Bacillus thuringiensis; identical to SEQ ID NO: 1479

SEQ ID NO: 1517 - protein, 789 aa, Bacillus thuringiensis; identical to SEQ ID NO: 1479

SEQ ID NO: 1518 - protein, 789 aa, Bacillus thuringiensis
MNKNNTKLSTRALPSFIDYFNGIYGFATGIKDIINMIFKTDTGGDLTLDEILKNQQLLNDISGKLDGVNGSLNDLIAQGNLNTELSKEILKIANEQNQVLNDVNNKLDAINTMLRVYLPKITSMLSDVMKQNYALSLQIEYLSKQLQEISDKLDIINVNVLINSTLTEITPAYQRIKYVNEKFEELTFATETSSKVKKDGSPADILDELTELTELAKSVTKNDVDGFEFYLNTFHDVMVGNNLFGRSALKTASELITKENVKTSGSEVGNVYNFLIVLTALQAKAFLTLTTCRKLLGLADIDYTSIMNEHLNKEKEEFRVNILPTLSNTFSNPNYAKVKGSDEDAKMIVEAKPGHALIGFEISNDSITVLKVYEAKLKQNYQVDKDSLSEVIYGDMDKLLCPDQSEQIYYTNNIVFPNEYVITKIDFTKKMKTLRYEVTANFYDSSTGEIDLNKKKVESSEAEYRTLSANDDGVYMPLGVISETFLTPINGFGLQADENSRLITLTCKSYLRELLLATDLSNKETKLIVPPSGFISNIVENGSIEEDNLEPWKANNKNAYVDHTGGVNGTKALYVHKDGGISQFIGDKLKPKTEYVIQYTVKGKPSIHLKDENTGYIHYEDTNNNLEDYQTINKRFTTGTDLKGVYLILKSQNGDEAWGDNFIILEISPSEKLLSPELINTNNWTSTGSTNISGNTLTLYQGGRGILKQNLQLDSFSTYRVYFSVSGDANVRIRNSREVLFEKRYMSGAKDVSEMFTTKFEKDNFYIELSQGNNLYGGPIVHFYDVSIK

SEQ ID NO: 1519 - protein, 789 aa, Bacillus thuringiensis; identical to SEQ ID NO: 1518

SEQ ID NO: 1520 - protein, 788 aa, Bacillus thuringiensis
MNKNNTKLSTRALPSFIDYFNGVYGFATGIKDIMNMIFKTDTGGDLTLDEILKNQQLLNDISGKLDGVNGSLNDLIAQGNLNTELSKEILKIANEQNQVLNDVNNKLDAINTMLRVYPPKITSMLSDVMKQNYALSLQIEYLSKQLQEISDKLDIINVNVLINSTLTEITPAYQRIKYVNEKFEELTFATETSSKVKRDGSPADILDELTELTELAKSVTKNDVDGFEFYLNTFHDVMVGNNLFGRSALKTASELITKENVKTSGSEVGNVYNFLIVLTALQAKAFLTLTTCRKLLGLADIDYTSIMNEHLNKEKEEFRVNILPTLSNTFSNPNYAKVKGSDEDAKMIVEAKPGHALIGFEISNDSITVLKVYEAKLKQNYQVDKDSLSEVIYGDMDKLLCPDQSEQIYYTNNIVFPNEYVITKIDFTKKMKTLRYEVTANLYDSSTGEIDLNKKKVESSEAEYRTLSANDDGVYMPLGVISETFLTPINGFGLQADENSRLITLTCKSYLRELLLATDLSNKETKLIVPPSGFISNIVENGSIEEDNLEPWKANNKNAYVDHTGGVNGTKALYVHKDGGISQFIGDKLKPKTKYVIQYTVKGKPSIHLKDENTGYIHYEDTNNNLEDYQTINKRFTTGTDLKGVYLILKSQNGDEAWGDNFIILEISPSEKLLSPELINTNNWTSTGSTNISGNTLTLYQGGRGILKQNLQLDSFSTYRVYFSVSGDANVRIRNSREVLFEKRYMSGAKDVSEMFTTKFEKDNFYIELSQGNNLYGGPIVHFYDVSI

SEQ ID NO: 1521 - protein, 788 aa, Bacillus thuringiensis; identical to SEQ ID NO: 1520

SEQ ID NO: 1522 - protein, 788 aa, Bacillus thuringiensis
MNKNNTKLSTRALPSFIDYFNGIYGFATGIKDIMNMIFKTDTGGDLTLDEILKNQQLLNDISGKLDGVNGSLNDLIAQGNLNTELSKEILKIANEQNQVLNDVNNKLDAINTMLRVYLPKITSMLSDVMKQNYALSLQIEYLSKQLQEISDKLDIINVNVLINSTLTEITPAYQRIKYVNEKFEELTFATETSSKVKKDGSPADILDELTELTELAKSVTKNDVDGFEFYLNTFHDVRVGNNLFGRSALKTASELITKENVKTSGSEVGNVYNFLIVLTALQAKAFLTLTTCRKLLGLADIDYTSIMNEHLSKEKEEFRVNILPTLSNTFSNPNYAKVKGSDEDAKMIVEAKPGHALIGFEISNDSITVLKVYEAKLKQNYQVDKDSLSEVIYGDMDKLLCPDQSEQIYYTNNIVFPNEYVITKIDFTKKMKTLRYEVTANFYDSSTGEIDLNKKKVESSEAEYRTLSANDDGVYMPLGVISETFLTPINGFGLQADENSRLITLTCKSYLRELLLATDLSNKETKLIVPPSGFISNIVENGSIEEDNLEPWKANNKNAYVDHTGGVNGTKALYVHKDGGISQFIGDKLKPKTEYVTQYTVKGKPSIHLKDENTGYIHYEDTNNNLEDYQTINKRFTTGTDLKGVYLILKSQNGDEAWGDNFIILEISPSEKSLSPELINTNNWTSTGSTNISGNTLTLYQGGRGILKQNLQLDSFSTYRVYFSVSGDANVRIRNSREVLFEKRYMSGAKDVSEMFTTKFEKDNFYIELSQGNNLYGGPIVHFYDVSI

SEQ ID NO: 1523 - protein, 788 aa, Bacillus thuringiensis; identical to SEQ ID NO: 1522

SEQ ID NO: 1524 - protein, 787 aa, Bacillus thuringiensis
MNMNNTKLNARALPSFIDYFNGIYGFATGIKDIMNMIFKTDTGGNLTLDEILKNQQLLNEISGKLDGVNGSLNDLIAQGNLNTELSKEILKIANEQNQVLNDVNNKLDAINTMLHIYLPKITSMLSDVMKQNYALSLQVEYLSKQLKEISDKLDVINVNVLINSTLTEITPAYQRIKYVNEKFEELTFATETTLKVKKDSSPADILDELTELTELAKSVTKNDVDGFEFYLNTFHDVMVGNNLFGRSALKTASELIAKENVKTSGSEVGNVYNFLIVLTALQAKAFLTLTTCRKLLGLADIDYTSIMNEHLNKEKEEFRVNILPTLSNTFSNPNYAKVKGSDEDAKMIVEAKPGHALVGFEISNDSMTVLKVYEAKLKQNYQVDKDSLSEVIYSDMDKLLCPDQSEQIYYTNNIVFPNEYVITKIDFTKKMKTLRYEVTANSYDSSTGEIDLNKKKVESSEAEYRTLSANNDGVYMPLGVISETFLTPINGFGLQADENSRLITLTCKSYLRELLLATDLSNKETKLIVPPISFISNIVENGNLEGENLEPWIANNKNAYVDHTGGINGTKVLYVHKDGEFSQFVGGKLKSKTEYVIQYIVKGKASIYLKDKKNENSIYEEINNDLEGFQTVTKRFITGTDSSGIHLIFTSQNGEGAFGGNFIISEIRTSEELLSPELIMSDAWVGSQGTWISGNSLTINSNVNGTFRQNLPLESYSTYSMNFTVNGFGKVTVRNSREVLFEKSYPQLSPKDISEKFTTAANNTGLYVELSRSTSGGAINFRDFSIK

SEQ ID NO: 1525 - protein, 787 aa, Bacillus thuringiensis; identical to SEQ ID NO: 1524

SEQ ID NO: 1526 - protein, 787 aa, Bacillus thuringiensis; identical to SEQ ID NO: 1524

SEQ ID NO: 1527 - protein, 786 aa, Bacillus thuringiensis
MQKNNKLSVKALPSFIDYFNGIYGFATGIKDIMNMIFKTNTGGDLTLDEILKNQQLLNEISGKLDGVNGSLNDLLAQGNLDTELSKEILKIANEQNKVLNDVNTKLDAINLMLNTYLPKITSMLSDVMKQNYALGLQIEYLSKQLKEISDKLDVINVNVLINSTLTEITPAYQRIKYVNEKFEALTSATETNLKTKQDSSHTDILDELTELTELAKSVTKNDVDGFEFYLNTFHDVMIGNNLFGRSALKTASELIAKENLKTSGSEVGNVYNFLIVLTALQAKAFLTLTTCRKLLGLADIDYTPIMNEHLNKEKEEFRVNILPTLSNTFSNPNYEKARGSDKDAKIIMEAKPGYALVGFEISKDSIAVLKVYQAKLKHNYQIDKDSLSEIVYGDIDKLLCPDQSEQMYYTNKIAFPNEYVITKIAFTKKLNSLRYEVTANFYDSSTGDIDLNKKKIESSEAEFSMLNANNDGVYMPIGTISETFLTPINGFGLVVDENSRLVTLTCKSYLRETLLATDLSNKETKLIVPPNGFISNIVENGNLEGENLEPWKANNKNAYVDHTGGVNGTKVLYVHEDGEFSQFIGDKLKLKTEYVIQYIVKGKAAIYLKDEKNGDYIYEETNNELEDFQAVTKRFITGTDSSRVHLIFTSQNGEEAFGGNFIISEIRPSEELLSPELIKSDAWVGSQGTWISGNSLNINSNVNGTFRQNLSLESYSTYSMNFNVNGFGKVTIRNSREVVFERSYLQFSSKYISEKFTTTTNNTGLYVELSRASSRGVINFGDFSIK

SEQ ID NO: 1528 - protein, 786 aa, Bacillus thuringiensis
MNMNNTKLNARALPSFIDYFNGIYGFATGIKDIMNMIFKTDTGGNLTLDEILKNQQLLNEISGKLDGVNGSLNDLIAQGNLNTELAKQILKVANEQNQVLNDVNNKLDAINSMLKIYLPKITSMLSDVMKQNYVLSLQIEYLSKQLQEISDKLDIINVNVLINSTLTEITPAYQRIKYVNEKFDDLTFATENTLKVKKDSSPADILDELTELTELAKSVTKNDVDGFEFYLNTFHDVMVGNNLFGRSALKTASELIAKENVKTSGSEVGNVYNFLIVLTALQAKAFLTLTTCRKLLGLADIDYTSIMNEHLNKEKEEFRVNILPTLSNTFSNPNYAKAKGSNEDTKMIVEAKPGYVLVGFEMSNNSITVLKAYQAKLKKDYQIDKDSLSEIIYSDTDKLLCPDQSEQIYYTKNIAFPNEYVITKIAFTKKMNSLRYEATANFYDSSTGDIDLNKTKVESSEAEYSMLKASDDEVYMPLGLISETFLNPINGFRLAVDENSRLVTLTCRSYLRETLLATDLNNKETKLIVPPNVFISNIVENGNIEMDTLEPWKANNENANVDYSGGVNGTRALYVHKDGEFSHFIGDKLKSKTEYLIRYIVKGKASIFLKDEKNENYIYEDTNNNLEDYQTITKRFTTGTDSTGVYLIFNSQNGDEAWGDNFIILEISPCEKLLSPELIKTDKWISTGSTYISDDRLTLYQGGRGILKQNLQLDRFSTYRVNFSVNGDANVRIRNSREVLLEKRYLNRKGVSEMFTTKFDKDNFYVELSQGDNLGTVVHFYDFSIK

SEQ ID NO: 1529 - protein, 786 aa, Bacillus thuringiensis
MNMNNAKLNARALPSFIDYFNGIYGFATGIKDIMNMIFKTDTGSNLTLDEILKNQQLLNEISGKLDGVNGSLNDLIAQGNLNTELAKQILKVANEQNQVLNDVNNKLDAINSMLKIYLPKITSMLSDVMKQNYVLSLQIEYLSKQLQEISDKLDIINVNVLINSTLTEITPAYQRMKYVNEKFEELTFATETTLKVKKDSPPADILDELTELTELAKSVTKNDVDGFEFYLNTFHDVMVGNNLFGRSALKTASELIAKENVKTSGSEVGNVYNFLIVLTALQAKAFLTLTTCRKLLGLADIDYTSIMNEHLNKEKEEFRVNILPTLSNTFSNPNYAKAKGSNEDTKMIVEAKPGYVLVGFEMSNDSITVLKAYQAKLKKDYQIDKDSLSEIIYSDTDKLLCPDQSEQIYYTKNIAFPNEYVITKIAFTKKMNSLRYEATANFYDSSTGDIDLNKTKVESSEAEYSMLKASDDEVYMPLGLISETFLNPINGFRLAVDENSRLVTLTCRSYLRETLLATDLNNKETKLIVPPNVFISNIVENGNIEMDTLEPWKANNENANVDYSGGVNGTRALYVHKDGEFSHFIGDKLKSKTEYLIRYIVKGKASIFLKDEKNENYIYEDTNNNLEDYQTITKRFTTGTDSTGVYLIFNSQNGDEAWGDNFIILEISPCEKLLSPELIKTDKWNSTGSTYISDDRLTLYRGGRGILKQNLQLDGFSTYRVNFSVDGDANVRIRNSREVLLEKRYLNRKGVSEMFTTKFDKDNFYVELSQGDNLGTIVHFYDFSIK

SEQ ID NO: 1530 - protein, 787 aa, Bacillus thuringiensis
MNMNNTKLNARALPSFIDYFNGIYGFATGIKDIMNMIFKTDTGGNLTLDEILKNQQLLNEISGKLDGVNGSLNDLIAQGNLNTELSKEILKIANEQNQVLNDVNNKLDAINTMLHIYLPKITSMLSDVMKQNYALSLQIEYLSKQLQEISDKLDIINVNVLINSTLTEITPAYQRIKYVNEKFEELTFATETTLKVKEDGSPADILDELTELTELAKSVTKNEVDGFEFYLNTFHDVMVGNNLFGRSALKTASELIAKENVKTSGSEVGNVYNFLIVLTALQAKAFLTLTTCRKLLGLADIDYTSIMNEHLNKEKEEFRVNILPTLSNTFSNPNYVKAKGSDRDAKMIVEAKPGYALVGFEMSNDSMTVLKAYQAKLKQDYQVDKDSLSEIVYGDMNKLLCPDQSEQIYYTNNIAFPREYVITKLTFTKKMNSLRYEATANFYDSSTGDMDLNKTKVESSEAEYSRLSASNDGVYMPLGLISETFLTPINGFGLVVDENSRLVTLTCKSYLREILLATDLSNKETKLIVPPNGFISNIVENGNLEGENLEPWKANNKNAYIDHTGGVKGTKVLYVHKDGEFSQFIGYKLKSKTEYVIQYIVKGKAVIYLKDEKNGDYIYEEINNELEDFQTVTKRFITGTDSSGVHLIFTSQNGEEAFGGNFIISEIRPSEELLSPELIKSDAWVGTQGAWNSGNSLTIYTNTNGTFRQNLPLESYSTYSMNFNITGFGKVTIRNSREVLFEKNFSQLSPKDYSEKFTTAANNTGFYVELSRGTQGGNITFRDFSIK

SEQ ID NO: 1531 - protein, 788 aa, Bacillus thuringiensis
MNMNNTKLNARALPSFIDYFNGIYGFATGIKDIMNMIFKTDTGGNLTLDEILKNQQLLNEISGKLDGVNGSLNDLIAQGNLNTELSKEILKIANEQNQVLNDVNNKLDAINTMLHIYLPKITSMLSDVMKQNYALSLQIEYLSKQLQEISDKLDIINVNVLINSTLTEITPAYQRIKYVNEKFEELTFATETTLKVKKDSSPADILDELTELTELAKSVTKNDVDGFEFYLNTFHDVMVGNNLFGRSALKTASELIAKENVKTSGSEVGNVYNFLIVLTALQAKAFLTLTTCRKLLGLADIDYTSIMNEHLNKEKEEFRVNILPTLSNTFSNPNYAKVKGSDEDAKMIVEAKPGHALVGFEMSNDSITVLKVYEAKLKQNYQVDKDSLSEVIYGDTDKLFCPDQSEQIYYTNNIVFPNEYVITKIDFTKKMKTLRYEVTANFYDSSTGEIDLNKKKVESSEAEYRTLSANDDGVYMPLGVISETFLTPINGFGLQADENSRLITLTCKSYLRELLLATDLSNKETKLIVPPSGFISNIVENGSIEEDNLEPWKANNKNAYVDHTGGVNGTKALYVHKDGGFSQFIGDKLKPKTEYVIQYTVKGKPSIHLKDENTGYIHYEDTNNNLKDYQTITKRFTTGTDLKGVYLILKSQNGDEAWGDKFTILEIKPAEDLLSPELINPNSWITTPGASISGNKLFINLGTNGTFRQSLSLNSYSTYSISFTASGPFNVTVRNSREVLFERSNLMSSTSHISGTFKTESNNTGLYVELSRRSGGGGHISFENVSIK

SEQ ID NO: 1532 - protein, 787 aa, Bacillus thuringiensis
MNKNNTKLSTRALPSFIDYFNGIYGFATGIKDIMNMIFKTDTGGNLTLDEILKNQQLLNEISGKLDGVNGSLNDLIAQGNLNTELSKEILKIANEQNQVLNDVNNKLDAINTMLHIYLPKITSMLSDVMKQNYALSLQIEYLSKQLQEISDKLDIINVNVLINSTLTEITPAYQRIKYVNEKFEELTFATETTLKVKKDSSPADILDELTELTELAKSVTKNDVDGFEFYLNTFHDVMVGNNLFGRSALKTASELIAKENVKTSGSEVGNVYNFLIVLTALQAKAFLTLTTCRKLLGLAGIDYTSIMNEHLNKEKEEFRVNILPTLSNTFSNPNYAKVKGSDEDAKMIVEAKPGHALVGFEMSNDSITVLKVYEAKLKQNYQVDKDSLSEVIYGDTDKLFCPDQSEQIYYTNNIVFPNEYVITKIDFTKKMKTLRYEVTANFYDSSTGEIDLNKKKVESSEAEYRTLSANDDGVYMPLGVISETFLTPINGFGLQADENSRLITLTCKSYLRELLLATDLSNKETKLIVPPSGFISNIVENGSIEEDNLEPWKANNKNAYVDHTGGVNGTKALYVHKDGGFSQFIGDKLKPKTEYVIQYTVKGKPSIHLKDENTGYIHYEDTNNNLKDYQTITKRFTTGTDLKGVYLILKSQNGDEAWGDKFTILEIKPAEDLLSPELINPNSWITTPGASISGNKLFINLGTNGTFRQSLSLNSYSTYSISFTASGPFNVTVRNSRVLFERSNLMSSTSHISGTFKTESNNTGLYVELSRRSGGGGHISFENVSIK

SEQ ID NO: 1533 - protein, 788 aa, Bacillus thuringiensis
MNKNNTKLSTRALPSFIDYFNGIYGFATGIKDIMNMIFKTDTGGDLTLDEILKNQQLLNDISGKLDGVNGSLNDLIAQGNLNTELSKEILKIANEQNQVLNDVNNKLDAINTMLRVYLPKITSMLSDVMKQNYALSLQIEYLSKQLQEISDKLDIINVNVLINSTLTEITPAYQRIKYVNEKFEELTFATETSSKVKKDGSPADILDELTELTELAKSVTKNDVDGFEFYLNTFHDVMVGNNLFGRSALKTASELITKENVKTSGSEVGNVYNFLIVLTALQAKAFLTLTTCRKLLGLADIDYTSIMNEHLNKEKEEFRVNILPTLSNTFSNPNYAKVKGSDEDAKMIVEAKPGHALIGFEISNDSITVLKVYEAKLKQNYQVDKDSLSEVIYGDMDKLLCPDQSEQIYYTNNIVFPNEYVITKIDFTKKMKTLRYEVTANFYDSSTGEIDLNKKKVESSEAEYRTLSANDDGVYMPLGVISETFLTPINGFGLQADENSRLITLTCKSYLRELLLATDLSNKETKLIVPPSGFISNIVENGSIEEDNLEPWKANNKNAYVDHTGGVNGTKALYVHKDGGISQFIGDKLKPKTEYVIQYTVKGKPSIHLKDENTGYIHYEDTNNNLEDYQTINKRFTTGTDLKGVYLILKSQNGDEAWGDKFTILEIKPAEDLLSPELINPNSWITTPGASISGNKLFINLGTNGTFRQSLSLNSYSTYSISFTASGPFNVTVRNSRGVLFERSNLMSSTSHISGTFKTESNNTGLYVELSRRSGGGGHISFENVSIK

SEQ ID NO: 1534 - protein, 788 aa, Bacillus thuringiensis; identical to SEQ ID NO: 1531

SEQ ID NO: 1535 - protein, 787 aa, Bacillus thuringiensis
MNKNNTKLNARALPSFIDYFNGIYGFATGIKDIMNMIFKTDTGGNLTLDEILKNQQLLNEISGKLDGVNGSLNDLIAQGNLNTELSKEILKIANEQNQVLNDVNNKLNAINTMLHIYLPKITSMLNDVMKQNYALSLQIEYLSKQLQEISDKLDVINVNVLINSTLTEITPAYQRMKYVNEKFEDLTFATETTLKVKKNSSPADILDELTELTELAKSVTKNDVDGFEFYLNTFHDVMVGNNLFGRSALKTASELIAKENVKTSGSEVGNVYNFLIVLTALQAKAFLTLTTCRKLLGLADIDYTFIMNEHLDKEKEEFRVNILPTLSNTFSNPNYAKAKGSNEDAKIIVEAKPGYALVGFEMSNDSITVLKAYQAKLKQDYQVDKDSLSEIVYGDMDKLLCPDQSEQIYYTNNIAFPNEYVITKITFTKKMNSLRYEATANFYDSSTGDIDLNKTKVESSEAEYSTLSASTDGVYMPLGIISETFLTPINGFGIVVDENSKLVNLTCKSYLREVLLATDLSNKETKLIVPPIGFISNIVENGNLEGENLEPWKANNKNAYVDHTGGVNGTKALYVHKDGEFSQFIGDKLKSKTEYVIQYIVKGKASILLKDEKNGDCIYEDTNNGLEDFQTITKSFITGTDSSGVHLIFNSQNGDEAFGENFTISEIRLSEDLLSPELINSDAWVGSQGTWISGNSLTINSNVNGTFRQNLSLESYSTYSMNFNVNGFAKVTVRNSREVLFEKNYPQLSPKDISEKFTTAANNTGLYVELSRFTSGGAINFRNFSIK

SEQ ID NO: 1536 - protein, 787 aa, Bacillus thuringiensis
MNKNNTKLSARALPSFIDYFNGIYGFATGIKDIMNMIFKTDTGGNLTLDEILKNQQLLNEISGKLDGVNGSLNDLIAQGNLNTELSKEILKIANEQNQVLNDVNNKLNAINTMLHIYLPKITSMLNDVMKQNYALSLQIEYLSKQLQEISDKLDVINVNVLINSTLTEITPAYQRMKYVNEKFEDLTFATETTLKVKKNSSPADILDELTELTELAKSVTKNDVDGFEFYLNTFHDVMVGNNLFGRSALKTASELIAKENVKTSGSEVGNVYNFLIVLTALQAKAFLTLTTCRKLLGLADIDYTFIMNEHLDKEKEEFRVNILPTLSNTFSNPNYAKAKGSNEDAKIIVEAKPGYALVGFEMSNDSITVLKAYQAKLKRDYQVDKDSLSEIVYGDMDKLLCPDQSEQIYYTNNIAFPNEYVITKITFTKKMNSLRYEATANFYDSSTGDIDLNKTKVESSEAEYSTLSASTDGVYTPLGIISETFLTPINGFGIVVDENSKLVNLTCKSYLREVLLATDLSNKETKLIVPPIGFISNIVENGNLEGENLEPWKANNKNAYVDHTGGVNGTKALYVHKDGEFSQFIGDKLKSKTEYVIQYIVKGKASILLKDEKNGDCIYEDTNNGLEDFQTITKSFITGTDSSGVHLIFNSQNGDEAFGENFTISEIRLSEDLLSPELINSDAWVGSQGTWISGNSLTINSNVNGTFRQNLSLESYSTYSMNFNVNGFAKVTVRNPREVLFEKNYPQLSPKDISEKFTTAANNTGLYVELSRFTSGGAINFRDFSIK

SEQ ID NO: 1537 - protein, 840 aa, Bacillus thuringiensis
  MISC_FEATURE (58)..(58): Xaa is Ala, Arg, Asn, Asp, Asx, Cys, Glu, Gln, Glx, Gly, His, Ile, Leu, Lys, Met, Phe, Pro, Ser, Thr, Trp, Tyr, or Val.
MNMNNTKLNARALPSFIDYFNGIYGFATGIKDIMNMIFKTDTGGNLTLDEILKNQQLXNEISGKLDGVNGSLNDLIAQGNLNTELSKEILKIANEQNQVLNDVNNKLNAINTMLHIYLPKITSMLNDVMKQNYALSLQIEYLSKQLQEISDKLDVINVNVLINSTLTEITPAYQRMKYVNEKFEDLTFATETTLKVKKNSSPADILDELTELTELAKSVTKNDVDGFEFYLNTFHDVMVGNNLFGRSALKTASELIAKENVKTSGSEVGNVYNFLIVLTALQAKAFLTLTTCRKLLGLADIDYTFIMNEHLDKEKEEFRVNILPTLSNTFSNPNYAKAKGSNEDAKIIVEAKPGYALVGFEMSNDSITVLKAYQAKLKQDYQVDKDSLSEIVYGDMDKLLCPDQSEQIYYTNNIAFPNEYVITKITFTKKMNSLRYEATANFYDSSTGDIDLNKTKVESSEAEYSTLSASTDGVYMPLGIISETFLTPINGFGIVVDENSKLVNLTCKSYLREVLLATDLSNKETKLIVPPIGFISNIVENGNLEGENLEPWKANNKNAYVDHTGGVNGTKALYVHKDGEFSQFIGDKLKSKTEYVIQYIVKGKASILLKDEKNGDCIYEDTNNGLEDFQTITKSFITGTDSSGVHLIFNSQNGDEAFGENFTISEIRLSEDLLSPELINSDAWVGSQGTWISGNSLTINSNVNGTFRQNLSLESYSTYSMNFNVNGFAKVTVRNSREVLFEKNYPQLSPKDISEKFTTAANNTGLYVELSRFTSGGAINFRDFSIKLVDPNSVQARLQDVDGTIDTRSKLAAAQLYTRASQPELAPEDPEDLEHHHHHH

SEQ ID NO: 1538 - protein, 787 aa, Bacillus thuringiensis; identical to SEQ ID NO: 1535

SEQ ID NO: 1539 - protein, 787 aa, Bacillus thuringiensis
MNKNNTKLSARALPSFIDYFNGIYGFATGIKDIMNMIFKTDTGGNLTLDEILKNQQLLNEISGKLDGVNGSLNDLIAQGNLNTELSKEILKIANEQNQVLNDVNNKLNAINTMLHIYLPKITSMLNDVMKQNYALSLQIEYLSKQLQEISDKLDVINVNVLINSTLTEITPAYQRMKYVNEKFEDLTFATETTLKVKKNSSPADILDELTELTELAKSVTKNDVDGFEFYLNTFHDVMVGNNLFGRSALKTASELIAKENVKTSGSEVGNVYNFLIVLTALQAKAFLTLTTCRKLLGLADIDYTFIMNEHLDKEKEEFRVNILPTLSNTFSNPNYAKAKGSNEDAKIIVEAKPGYALVGFEMSNDSITVLKAYQAKLKQDYQVDKDSLSEIVYGDMDKLLCPDQSEQIYYTNNIAFPNEYVITKITFTKKMNSLRYEATANFYDSSTGDIDLNKTKVESSEAEYSTLSASTDGVYMPLGIISETFLTPINGFGIVVDENSKLVNLTCKSYLREVLLATDLSNKETKLIVPPIGFISNIVENGNLEGENLEPWKANNKNAYVDHTGGVNGTKALYVHKDGEFSQFIGDKLKSKTEYVIQYIVKGKASILLKDEKNGDCIYEDTNNGLEDFQTITKSFITGTDSSGVHLIFNSQNGDEAFGENFTISEIRLSEDLLSPELINSDAWVGSQGTWISGNSLTINSNVNGTFRQNLSLESYSTYSMNFNVNGFAKVTVRNSREVLFEKNYPQLSPKDISEKFTTAANNTGLYVELSRFTSGGAINFRDFSIK

SEQ ID NO: 1540 - protein, 795 aa, Bacillus thuringiensis
MNKNNTKLSTRALPSFIDYFNGIYGFATGIKDIMNMIFKTDTGGDLTLDEILKNQQLLNEISGKLDGVNGSLNDLIAQGNLNTELSKEILKIANEQNQVLNDVNNKLDAINTMLHIYLPKITSMLSDVMKQNYALSLQIEYLSKQLQEISDKLDIINVNVLINSTLTEITPAYQRIKYVNEKFEELTFATETNLKVKKDGSPADILDELTELTELAKSVTKNDVDGFEFYLNTFHDVMVGNNLFGRSALKTASELITKENVKTSGSEVGNVYNFLIVLTALQAKAFLTLTTCRKLLGLADIDYTSIMNEHLNKEKEEFRVNILPTLSNTFSNPNYIKTKGSDEDAEVIIQAEPGHALVGFEMINDPSPALKVYQAKLKPNYQVDKQSLSETVYGDMDKILCPDKSQQMYYLHNITFPNEYVITEIIFTKKKNSLRYEVIANYYEFSSGDIDLNKKLVKSSEAEYSTLSVSNDAIYMPLGVISETFLTPIKGFGLTVDESSRLVTLTCKSYLREILLATDLSNKATKLIVPPNGFISNLVENGDIEADNIEPWKGNNKNAYVDHTGGVNGTKALYTQDDGEFSQFIGDKLKSKTEYIIQYTVKGNTSIYLKDKKNENVIYEDKNNNLEAFQTITKRFTTELDSSDVYLVFKCKNGYKAWGDNFLITEIRPKEVVSPELIKVENWIGMGGSNHVNPDSLLLFTGGRSILKQNLQLDSYSTYRVRFSLMVIGKAKVIIRNSSEVLFEKSYVNDSEGVLEGVSETFTTKSIQDNFYVELSNEGTFGSKDVAYFYNFSIK

SEQ ID NO: 1541 - protein, 795 aa, Bacillus thuringiensis; identical to SEQ ID NO: 1540

SEQ ID NO: 1542 - protein, 803 aa, Bacillus thuringiensis
MNMNNTKLNARALPSFIDYFNGIYGFATGIKDIMNMIFKTDTGGGNLTLDEILKNQDLLNQISDKLDGINGDLGDLIAQGNLNSELTKELLKIANEQNLMLNNVNAQLNSINATLNTYLPKITSMLNEVMKQNYVLSLQIEFLSKQLQEISDKLDIINLNVLINSTLTEITPAYQRIKYVNDKFDELTSTVEKNPKINQDNFTEDVIDNLTDLTELARSVTRNDMDSFEFYIKTFHDVMIGNNLFSRSALKTASELIAKENIHTRGSEIGNVYTFMIVLTSLQAKAFLTLTTCRKLLGLADIDYTQIMNENLDREKEEFRLNILPTLSNDFSNPNYTETLGSDLVDPIVTLEAEPGYALIGFEILNDPLPVLKVYQAKLKPNYQVDKESIMENIYGNIHKLLCPKQREQKYYIKDMTFPEGYVITKIVFEKKLNLLGYEVTANLYDPFTGSIDLNKTILESWKEDCCEEDCCEEDCCEEDCCEELYKIIEADTNGVYMPLGVISETFLTPIYSFKLIIDEKTKKISLAGKSYLRESLLATDLVNKETNLIPSPNGFISSIVQNWHITSDNIEPWKANNKNAYVDKTDAMVGFSSLYTHKDGEFLQFIGAKLKAKTEYIIQYTVKGNPEVYLKNNKDICYEDKTNNFDTFQTITKKFNSGVDPSEIYLVFKNQIGYEAWGNNFIILEIKSLETLPQILKPENWIPLGNAEIKEDGKIEISGNGSMNQYIQLEQNSKYHLRFSVKGKGRVTMQAQTSHINVPATNEEVSIMIETTRLYGEGIISLLNDEVENSGVIFSDVSIVKE

SEQ ID NO: 1543 - protein, 803 aa, Bacillus thuringiensis; identical to SEQ ID NO: 1542

SEQ ID NO: 1544 - protein, 801 aa, Bacillus thuringiensis
MNNTKLNARALPSFIDYFNGIYGFATGIKDIMNMIFKTDTGGGNLTLDEILKNQDLLNQISDKLDGINGDLGDLIAQGNLNSELTKELLKIANEQNLMLNNVNAQLNSINSTLNTYLPKITSMLSEVMKQNYVLSLQIEFLSEQLQEISDKLDVINLNVLINSTLTEITPAYQRIKYVNDKFDELTSTVEKNPKINQDNFTEDVIDNLTDLTELARSVTRNDMDSFEFYIKTFHDVMIGNNLFSRSALKTASELIAKENIHTMGSEIGNVYTFMVVLTSLQAKAFLTLTACRKLLGLTDIDYTQIMNENLNREKEEFRLNILPTLSNDFSNPNYTETLGSDLVDPIVTLEADPGYALIGFEILNDPLPVLKVYQAKLKPNYQVDKESIMENIYGNIHKLLCPKQRHQKYYIKDITFPEGYVITKIVFEKKLNLLGYEVTANLYDPFTGSIDLNKTILESWKEECCEEECCEEECCEEECCEELYKIIEADTNGVYMPLGVISETFLTPIYSFKLIIDERTKRISLAGKSYLRESLLATDLVNKDTNLIPSPNGFINSIVENWNITSDNIEPWKANNKNAYVDKTDDMVGFNSLYTHKDGEFLQFIGAKLKAKTEYIIQYTVKGSPEVYLKNNKGIFYEDTTNKFDTFQTITKKFNSGVDPSEIYLVFKNQIGYEAWGNKFIILEIKSFETLPQILKPENWMPFGNAEIKEDGKIEISGNGTMTQNIQLEQNSKYHLRFSVKGKGRVAIQTQSSHINVPATNEEVSTMITTRNLYGEGMIYLFNDDVENSKVIFSDVSLVKE

SEQ ID NO: 1545 - protein, 801 aa, Bacillus thuringiensis; identical to SEQ ID NO: 1544

SEQ ID NO: 1546 - protein, 700 aa, Bacillus thuringiensis
MNNTKLNARALPSFIDYFNGIYGFATGIKDIMNMIFKTDTGGGNLTLDEILKNQDLLNQISDKLDGINGDLGDLIAQGNLNSELTKELLKIANEQNLMLNNVNAQLNSINSTLNTYLPKITSMLSEVMKQNYVLSLQIEFLSEQLQEISDKLDVINLNVLINSTLTEITPAYQRIKYVNDKFDELTSTVEKNPKINQDNFTEDVIDNLTDLTELARSVTRNDMDSFEFYIKTFHDVMIGNNLFSRSALKTASELIAKENIHTMGSEIGNVYTFMVVLTSLQAKAFLTLTACRKLLGLTDIDYTQIMNENLNREKEEFRLNILPTLSNDFSNPNYTETLGSDLVDPIVTLEADPGYALIGFEILNDPLPVLKVYQAKLKPNYQVDKESIMENIYGNIHKLLCPKQRQQKYYIKDITFPEGYVITKIVFEKKLNLLGYEVTANLYDPFTGSIDLNKTILESWKEECCEEECCEEECCEEECCEELYKIIEADTNGVYMPLGVISETFLTPIYSFKLIIDERTKRISLAGKSYLRESLLATDLVNKDTNLIPSPNGFISSIVENWNITSDNIEPWKANNKNAYVDKTDDMVGFNSLYTHKDGEFLQFIGAKLKAKTEYIIQYTVKGSPEVYLKNNKGIFYEDTTNKFDTFQTITKKFNSGVDPSEIYLVFKNQIGYEAWGNKFIILEIKSFETLPQILKPENW

SEQ ID NO: 1547 - protein, 490 aa, Bacillus thuringiensis
MNKNNTKLSARALPSFIDYFNGIYGFATGIKDIMNMIFKTDTGGGNLTLDEILKNQDLLNQISDKLDGINGDLGDLIAQGNLNSELIKELLKIANEQNLMLNNVNAQLNSINSTLNTYLPKITSMLSEVMKQNYVLSLQIEFLSEQLQEISDKLDVINLNVLINSTLTEITPAYQRIKYVNDKFDELTSTVEKNPKINQDNFTEDVIDNLTDLTELARSVTRNDMDSFEFYIKTFHDAMIGNNLFSRSALKTASELIAKENIHTMGSEIGNVYTFMVVLTSLQAKAFLTLTACRKLLGLTDIDYTQIMNENLNREKEEFRLNVLPTLSNDFSNPNYTETLGSDLVDPIVTLEADPGYALIGFEILNDPLPVLKVYQAKLKPNYQVDKESIMENIYGNIHKLLCPKQRQQKYYIKDITFPEGYVITKIVFEKKLNLLGYEVTANLYDPFTGSIDLNKTILESWKEECCEEECCEEECCEEECCEELYKIIE

SEQ ID NO: 1548 - protein, 803 aa, Bacillus thuringiensis
MNKNNTKLNARALPSFIDYFNGIYGFATGIKDIMNMIFKTDTGGDLTLDEILKNQQLLNEISGKLDGVNGSLNDLIAQGNLNTELSKEILKIANEQNQVLNDVNNKLDAINTMLNIYLPKITSMLSDVMKQNYALSLQIEYLSRQLQEISDKLDVINLNVLINSTLTEITPSYQRIKYVNEKFDKLTFATESTLRAKQGIFNEDSFDNNTLENLTDLAELAKSITKNDVDSFEFYLHTFHDVLIGNNLFGRSALKTASELITKDEIKTSGSEIGKVYSFLIVLTSLQAKAFLTLTTCRKLLGLSDIDYTSIMNEHLNNEKNEFRDNILPALSNKFSNPSYAKTIGSDNYAKVILESEPGYALVGFEIINDPIPVLKAYKAKLKQNYQVDNQSLSEIVYLDIDKLFCPENSEQKYYTKNLTFPDGYVITKITFEKKLNNLIYEATANFYDPSTGDIDLNKKQVESTFPQTDYITMDIGDDDGIYMPLGVISETFLTPINSFGLEVDAKSKTLTLKCKSYLREYLLESDLKNKETGLIAPPNVFISNVVKNWDIEEDSLEPWVANNKNAYVDNTGGIERSKALFTQGDGEFSQFIGDKLKPNTDYIIQYTVKGKPAIYLKNKSTGYITYEDTNGNSEEFQTIAVKFTSETDLSQTHLVFKSQNGYEAWGDNFIILEAKLFETPESPELIKFNDWERFGTTYITGNELRIDHSRGGYFRQSLNIDSYSTYDLSFSFSGLWAKVIVKNSRGVVLFEKVKNNGSSYEDISESFTTASNKDGFFIELTAERTSSTFHSFRDISIKEKIE

SEQ ID NO: 1549 - protein, 803 aa, Bacillus thuringiensis
MNMNNTKLNARALPSFIDYFNGIYGFATGIKDIMNMIFKTDTGGDLTLDEILKNQQLLNEISGKLDGVNGSLNDLIAQGNLNTELSKEILKIANEQNQVLNDVNNKLDAINTMLNIYLPKITSMLSDVMKQNYALSLQIEYLSRQLQEISDKLDVINLNVLINSTLTEITPSYQRIKYVNEKFDKLTFATESTLRAKQGIFNEDSFDNNTLENLTDLAELAKSITKNDVDSFEFYLHTFHDVLIGNNLFGRSALKTASELITKDEIKTSGSEIGKVYSFLIVLTSLQAKAFLTLTTCRKLLGLSDIDYTSIMNEHLNNEKNEFRDNILPALSNKFSNPSYAKTIGSDNYAKVILESEPGYALVGFEIINDPIPVLKAYKAKLKQNYQVDNQSLSEIVYLDIDKLFCPENSEQKYYTKNLTFPDGYVITKITFEKKLNNLIYEATANFYDPSTGDIDLNKKQVESTFPQTDYITMDIGDDDGIYMPLGVISETFLTPINSFGLEVDAKSKTLTLKCKSYLREYLLESDLKNKETGLIAPPNVFISNVVKNWDIEEDSLEPWVANNKNAYVDNTGGIERSKALFTQGDGEFSQFIGDKLKPNTDYIIQYTVKGKPAIYLKNKSTGYITYEDTNGNSEEFQTIAVKFTSETDLSQTHLVFKSQNGYEAWGDNFIILEAKLFETPESPELIKFNDWERFGTTYITGNELRIDHSRGGYFRQSLNIDSYSTYDLSFSFSGLWAKVIVKNSRGVVLFEKVKNNGSSYEDISESFTTASNKDGFFIELTAERTSSTFHSFRDISIKEKIE

SEQ ID NO: 1550 - protein, 803 aa, Bacillus thuringiensis
MNKNNTKLNARALPSFIDYFNGIYGFATGIKDIMNMIFKTDTGGDLTLDEILKNQQLLNEISGKLDGVNGSLNDLIAQGNLNTELSKEILKIANEQNQVLNDVNNKLDAINTMLNIYLPKITSMLSDVMKQNYALSLQIEYLSRQLQEISDKLDVINLNVLINSTLTEITPSYQRIKYVNEKFDKLTFATESTLRAKQGIFNEDSFDNNTLENLADLAELAKSITKNDVDSFEFYLHTFHDVLIGNNLFGRSALKTASELITKDEIKTSGSEIGKVYSFLIVLTSLQAKAFLTLTTCRKLLGLSDIDYTSIMNEHLNNEKNEFRDNILPALSNKFSNPSYAKTIGSDNYAKVILESEPGYALVGFEIINDPIPVLKAYKAKLKQNYQVDNQSLSEIVYLDIDKLFCPENSEQKYYTKNLTFPDGYVITKITFEKKLNNLIYEATANFYDPSTGDIDLNKKQVESTFPQTDYITMDIGDDDGIYMPLGVISETFLTPINSFGLEVDAKSKTLTLKCKSYLREYLLESDLKNKETGLIAPPNVFISNVVKNWDIEEDSLEPWVANNKNAYVDNTGGIERSKALFTQGDGEFSQFIGDKLKPNTDYIIQYTVKGKPAIYLKNKSTGYITYEDTNGNSEEFQTIAVKFTSETDLSQTHLVFKSQNGYEAWGDNFIILEAKLFETPESPELIKFNDWERFGTTYITGNELRIDHSRGGYFRQSLNIDSYSTYDLSFSFSGLWAKVIVKNSRGVVLFEKVKNNGSSYEDISESFTTASNKDGFFIELTAERTSSTFHSFRDISIKEKIE

SEQ ID NO: 1551 - protein, 803 aa, Bacillus thuringiensis; identical to SEQ ID NO: 1549

SEQ ID NO: 1552 - protein, 803 aa, Bacillus thuringiensis; identical to SEQ ID NO: 1550

SEQ ID NO: 1553 - protein, 60 aa, Hadronyche versuta
MNTATGFIVLLVLATILGGIEAGESHMRKDAMGRVRRQYCVPVDQPCSLNTQPCCDDATC

SEQ ID NO: 1554 - protein, 76 aa, Hadronyche versuta; identical to SEQ ID NO: 569

SEQ ID NO: 1555 - protein, 75 aa, Hadronyche versuta; identical to SEQ ID NO: 572

SEQ ID NO: 1556 - protein, 38 aa, Hadronyche versuta; identical to SEQ ID NO: 573

SEQ ID NO: 1557 - protein, 75 aa, Hadronyche versuta; identical to SEQ ID NO: 574

SEQ ID NO: 1558 - protein, 38 aa, Hadronyche versuta; identical to SEQ ID NO: 575

SEQ ID NO: 1559 - protein, 76 aa, Hadronyche versuta; identical to SEQ ID NO: 576

SEQ ID NO: 1560 - protein, 76 aa, Hadronyche versuta; identical to SEQ ID NO: 578

SEQ ID NO: 1561 - protein, 39 aa, Hadronyche versuta; identical to SEQ ID NO: 6

SEQ ID NO: 1562 - protein, 76 aa, Hadronyche versuta; identical to SEQ ID NO: 580

SEQ ID NO: 1563 - protein, 39 aa, Hadronyche versuta; identical to SEQ ID NO: 581

SEQ ID NO: 1564 - protein, 76 aa, Hadronyche versuta; identical to SEQ ID NO: 582

SEQ ID NO: 1565 - protein, 39 aa, Hadronyche versuta; identical to SEQ ID NO: 581

SEQ ID NO: 1566 - protein, 76 aa, Hadronyche versuta; identical to SEQ ID NO: 584

SEQ ID NO: 1567 - protein, 39 aa, Hadronyche versuta; identical to SEQ ID NO: 581

SEQ ID NO: 1568 - protein, 76 aa, Atrax robustus; identical to SEQ ID NO: 586

SEQ ID NO: 1569 - protein, 39 aa, Atrax robustus; identical to SEQ ID NO: 581

SEQ ID NO: 1570 - protein, 22 aa, Hadronyche versuta
  MISC_FEATURE (4)..(4): Xaa is Ala, Arg, Asn, Asp, Asx, Cys, Glu, Gln, Glx, Gly, His, Ile, Leu, Lys, Met, Phe, Pro, Ser, Thr, Trp, Tyr, or Val.
  MISC_FEATURE (10)..(10): Xaa is Ala, Arg, Asn, Asp, Asx, Cys, Glu, Gln, Glx, Gly, His, Ile, Leu, Lys, Met, Phe, Pro, Ser, Thr, Trp, Tyr, or Val.
  MISC_FEATURE (16)..(16): Xaa is Ala, Arg, Asn, Asp, Asx, Cys, Glu, Gln, Glx, Gly, His, Ile, Leu, Lys, Met, Phe, Pro, Ser, Thr, Trp, Tyr, or Val.
  MISC_FEATURE (20)..(20): Xaa is Ala, Arg, Asn, Asp, Asx, Cys, Glu, Gln, Glx, Gly, His, Ile, Leu, Lys, Met, Phe, Pro, Ser, Thr, Trp, Tyr, or Val.
MNTXTGFIVXLVLATXLGGXEA

SEQ ID NO: 1571 - protein, 41 aa, Hadronyche versuta; identical to SEQ ID NO: 652

SEQ ID NO: 1572 - protein, 39 aa, Hadronyche versuta; identical to SEQ ID NO: 12

SEQ ID NO: 1573 - protein, 76 aa, Hadronyche versuta; identical to SEQ ID NO: 569

SEQ ID NO: 1574 - protein, 39 aa, Hadronyche versuta; identical to SEQ ID NO: 5

SEQ ID NO: 1575 - protein, 75 aa, Hadronyche versuta; identical to SEQ ID NO: 572

SEQ ID NO: 1576 - protein, 38 aa, Hadronyche versuta; identical to SEQ ID NO: 573

SEQ ID NO: 1577 - protein, 75 aa, Hadronyche versuta; identical to SEQ ID NO: 574

SEQ ID NO: 1578 - protein, 38 aa, Hadronyche versuta; identical to SEQ ID NO: 575

SEQ ID NO: 1579 - protein, 76 aa, Hadronyche versuta; identical to SEQ ID NO: 576

SEQ ID NO: 1580 - protein, 39 aa, Hadronyche versuta; identical to SEQ ID NO: 12

SEQ ID NO: 1581 - protein, 76 aa, Hadronyche versuta; identical to SEQ ID NO: 578

SEQ ID NO: 1582 - protein, 39 aa, Hadronyche versuta; identical to SEQ ID NO: 6

SEQ ID NO: 1583 - protein, 76 aa, Hadronyche versuta; identical to SEQ ID NO: 580

SEQ ID NO: 1584 - protein, 39 aa, Hadronyche versuta; identical to SEQ ID NO: 581

SEQ ID NO: 1585 - protein, 76 aa, Hadronyche versuta; identical to SEQ ID NO: 582

SEQ ID NO: 1586 - protein, 39 aa, Hadronyche versuta; identical to SEQ ID NO: 581

SEQ ID NO: 1587 - protein, 76 aa, Hadronyche versuta; identical to SEQ ID NO: 584

SEQ ID NO: 1588 - protein, 39 aa, Hadronyche versuta; identical to SEQ ID NO: 581

SEQ ID NO: 1589 - protein, 39 aa, Atrax robustus; identical to SEQ ID NO: 581

SEQ ID NO: 1590 - protein, 39 aa, Atrax robustus; identical to SEQ ID NO: 581

SEQ ID NO: 1591 - protein, 22 aa, Hadronyche versuta
  MISC_FEATURE (4)..(4): Xaa is Ala, Arg, Asn, Asp, Asx, Cys, Glu, Gln, Glx, Gly, His, Ile, Leu, Lys, Met, Phe, Pro, Ser, Thr, Trp, Tyr, or Val.
  MISC_FEATURE (10)..(10): Xaa is Ala, Arg, Asn, Asp, Asx, Cys, Glu, Gln, Glx, Gly, His, Ile, Leu, Lys, Met, Phe, Pro, Ser, Thr, Trp, Tyr, or Val.
  MISC_FEATURE (16)..(16): Xaa is Ala, Arg, Asn, Asp, Asx, Cys, Glu, Gln, Glx, Gly, His, Ile, Leu, Lys, Met, Phe, Pro, Ser, Thr, Trp, Tyr, or Val.
  MISC_FEATURE (20)..(20): Xaa is Ala, Arg, Asn, Asp, Asx, Cys, Glu, Gln, Glx, Gly, His, Ile, Leu, Lys, Met, Phe, Pro, Ser, Thr, Trp, Tyr, or Val.
MNTXTGFIVXLVLATXLGGXEA

SEQ ID NO: 1592 - protein, 15 aa, Hadronyche versuta
  MISC_FEATURE (1)..(1): Xaa is Ala, Arg, Asn, Asp, Asx, Cys, Glu, Gln, Glx, Gly, His, Ile, Leu, Lys, Met, Phe, Pro, Ser, Thr, Trp, Tyr, or Val.
XESHMRKDAMGRVRR

SEQ ID NO: 1593 - protein, 15 aa, Hadronyche versuta
  MISC_FEATURE (1)..(1): Xaa is Ala Arg Asn Asp Asx Cys Glu Gln Glx Gly His Ile Leu Lys Met Phe Pro Ser Thr Trp Tyr Val.
  MISC_FEATURE (1)..(1): Xaa is Ala, Arg, Asn, Asp, Asx, Cys, Glu, Gln, Glx, Gly, His, Ile, Leu, Lys, Met, Phe, Pro, Ser, Thr, Trp, Tyr, or Val.
XESHMRKDAMGRVRR

SEQ ID NO: 1594 - protein, 6 aa, Artificial Sequence
  cleavable linker
AFVRLF

SEQ ID NO: 1595 - protein, 5 aa, Artificial Sequence
  cleavable linker
AKLFV

SEQ ID NO: 1596 - protein, 6 aa, Artificial Sequence
  cleavable linker
ALFALK

SEQ ID NO: 1597 - protein, 5 aa, Artificial Sequence
  cleavable linker
ALFLK

SEQ ID NO: 1598 - protein, 5 aa, Artificial Sequence
  cleavable linker
ALFLR

SEQ ID NO: 1599 - protein, 4 aa, Artificial Sequence
  cleavable linker
ALFR

SEQ ID NO: 1600 - protein, 6 aa, Artificial Sequence
  cleavable linker
ALFRLR

SEQ ID NO: 1601 - protein, 6 aa, Artificial Sequence
  cleavable linker
ALKALF

SEQ ID NO: 1602 - protein, 5 aa, Artificial Sequence
  cleavable linker
ALKFF

SEQ ID NO: 1603 - protein, 6 aa, Artificial Sequence
  cleavable linker
ALKFLV

SEQ ID NO: 1604 - protein, 6 aa, Artificial Sequence
  cleavable linker
ALKFLV

SEQ ID NO: 1605 - protein, 6 aa, Artificial Sequence
  cleavable linker
ALKLFV

SEQ ID NO: 1606 - protein, 6 aa, Artificial Sequence
  cleavable linker
FFADIK

SEQ ID NO: 1607 - protein, 5 aa, Artificial Sequence
  cleavable linker
FFALK

SEQ ID NO: 1608 - protein, 4 aa, Artificial Sequence
  cleavable linker
FFLK

SEQ ID NO: 1609 - protein, 4 aa, Artificial Sequence
  cleavable linker
FFLR

SEQ ID NO: 1610 - protein, 5 aa, Artificial Sequence
  cleavable linker
FFRLR

SEQ ID NO: 1611 - protein, 6 aa, Artificial Sequence
  cleavable linker
FGYRIK

SEQ ID NO: 1612 - protein, 5 aa, Artificial Sequence
  cleavable linker
FLRLF

SEQ ID NO: 1613 - protein, 5 aa, Artificial Sequence
  cleavable linker
FYARR

SEQ ID NO: 1614 - protein, 6 aa, Artificial Sequence
  cleavable linker
GGLRKK

SEQ ID NO: 1615 - protein, 6 aa, Artificial Sequence
  cleavable linker
IFVALK

SEQ ID NO: 1616 - protein, 5 aa, Artificial Sequence
  cleavable linker
IFVLK

SEQ ID NO: 1617 - protein, 5 aa, Artificial Sequence
  cleavable linker
IFVLR

SEQ ID NO: 1618 - protein, 4 aa, Artificial Sequence
  cleavable linker
IFVR

SEQ ID NO: 1619 - protein, 6 aa, Artificial Sequence
  cleavable linker
IFVRLR

SEQ ID NO: 1620 - protein, 6 aa, Artificial Sequence
  cleavable linker
ILFNIK

SEQ ID NO: 1621 - protein, 6 aa, Artificial Sequence
  cleavable linker
LFAAPF

SEQ ID NO: 1622 - protein, 6 aa, Artificial Sequence
  cleavable linker
LFVALK

SEQ ID NO: 1623 - protein, 5 aa, Artificial Sequence
  cleavable linker
LFVLK

SEQ ID NO: 1624 - protein, 5 aa, Artificial Sequence
  cleavable linker
LFVLR

SEQ ID NO: 1625 - protein, 4 aa, Artificial Sequence
  cleavable linker
LFVR

SEQ ID NO: 1626 - protein, 6 aa, Artificial Sequence
  cleavable linker
LFVRLR

SEQ ID NO: 1627 - protein, 7 aa, Artificial Sequence
  cleavable linker
LFVRVFL

SEQ ID NO: 1628 - protein, 4 aa, Artificial Sequence
  cleavable linker
LGER

SEQ ID NO: 1629 - protein, 5 aa, Artificial Sequence
  cleavable linker
LKALF

SEQ ID NO: 1630 - protein, 4 aa, Artificial Sequence
  cleavable linker
LKFF

SEQ ID NO: 1631 - protein, 5 aa, Artificial Sequence
  cleavable linker
LKIFV

SEQ ID NO: 1632 - protein, 5 aa, Artificial Sequence
  cleavable linker
LKLFV

SEQ ID NO: 1633 - protein, 5 aa, Artificial Sequence
  cleavable linker
LRALF

SEQ ID NO: 1634 - protein, 4 aa, Artificial Sequence
  cleavable linker
LRFF

SEQ ID NO: 1635 - protein, 5 aa, Artificial Sequence
  cleavable linker
LRIFV

SEQ ID NO: 1636 - protein, 5 aa, Artificial Sequence
  cleavable linker
LRLFV

SEQ ID NO: 1637 - protein, 4 aa, Artificial Sequence
  cleavable linker
RALF

SEQ ID NO: 1638 - protein, 4 aa, Artificial Sequence
  cleavable linker
RIFV

SEQ ID NO: 1639 - protein, 4 aa, Artificial Sequence
  cleavable linker
RLFV

SEQ ID NO: 1640 - protein, 6 aa, Artificial Sequence
  cleavable linker
RLRALF

SEQ ID NO: 1641 - protein, 5 aa, Artificial Sequence
  cleavable linker
RLRFF

SEQ ID NO: 1642 - protein, 6 aa, Artificial Sequence
  cleavable linker
RLRIFV

SEQ ID NO: 1643 - protein, 6 aa, Artificial Sequence
  cleavable linker
RLRLFV

SEQ ID NO: 1644 - protein, 6 aa, Artificial Sequence
  cleavable linker
RRKAFV

SEQ ID NO: 1645 - protein, 6 aa, Artificial Sequence
  cleavable linker
RRKLIF

SEQ ID NO: 1646 - protein, 6 aa, Artificial Sequence
  cleavable linker
RRRFFA

SEQ ID NO: 1647 - protein, 6 aa, Artificial Sequence
  cleavable linker
VFGRKG

SEQ ID NO: 1648 - protein, 5 aa, Artificial Sequence
  cleavable linker
YFVRK

SEQ ID NO: 1649 - protein, 8 aa, Artificial Sequence
  cleavable linker
AFVRLFGS

SEQ ID NO: 1650 - protein, 7 aa, Artificial Sequence
  cleavable linker
AKLFVGS

SEQ ID NO: 1651 - protein, 8 aa, Artificial Sequence
  cleavable linker
ALFALKGS

SEQ ID NO: 1652 - protein, 7 aa, Artificial Sequence
  cleavable linker
ALFLKGS

SEQ ID NO: 1653 - protein, 7 aa, Artificial Sequence
  cleavable linker
ALFLRGS

SEQ ID NO: 1654 - protein, 6 aa, Artificial Sequence
  cleavable linker
ALFRGS

SEQ ID NO: 1655 - protein, 8 aa, Artificial Sequence
  cleavable linker
ALFRLRGS

SEQ ID NO: 1656 - protein, 8 aa, Artificial Sequence
  cleavable linker
ALKALFGS

SEQ ID NO: 1657 - protein, 7 aa, Artificial Sequence
  cleavable linker
ALKFFGS

SEQ ID NO: 1658 - protein, 8 aa, Artificial Sequence
  cleavable linker
ALKFLVGS

SEQ ID NO: 1659 - protein, 8 aa, Artificial Sequence
  cleavable linker
ALKIFVGS

SEQ ID NO: 1660 - protein, 8 aa, Artificial Sequence
  cleavable linker
ALKLFVGS

SEQ ID NO: 1661 - protein, 8 aa, Artificial Sequence
  cleavable linker
FFADIKGS

SEQ ID NO: 1662 - protein, 7 aa, Artificial Sequence
  cleavable linker
FFALKGS

SEQ ID NO: 1663 - protein, 6 aa, Artificial Sequence
  cleavable linker
FFLKGS

SEQ ID NO: 1664 - protein, 6 aa, Artificial Sequence
  cleavable linker
FFLRGS

SEQ ID NO: 1665 - protein, 7 aa, Artificial Sequence
  cleavable linker
FFRLRGS

SEQ ID NO: 1666 - protein, 8 aa, Artificial Sequence
  cleavable linker
FGYRIKGS

SEQ ID NO: 1667 - protein, 7 aa, Artificial Sequence
  cleavable linker
FLRLFGS

SEQ ID NO: 1668 - protein, 7 aa, Artificial Sequence
  cleavable linker
FYARRGS

SEQ ID NO: 1669 - protein, 8 aa, Artificial Sequence
  cleavable linker
GGLRKKGS

SEQ ID NO: 1670 - protein, 8 aa, Artificial Sequence
  cleavable linker
IFVALKGS

SEQ ID NO: 1671 - protein, 7 aa, Artificial Sequence
  cleavable linker
IFVLKGS

SEQ ID NO: 1672 - protein, 7 aa, Artificial Sequence
  cleavable linker
IFVLRGS

SEQ ID NO: 1673 - protein, 6 aa, Artificial Sequence
  cleavable linker
IFVRGS

SEQ ID NO: 1674 - protein, 8 aa, Artificial Sequence
  cleavable linker
IFVRLRGS

SEQ ID NO: 1675 - protein, 8 aa, Artificial Sequence
  cleavable linker
ILFNIKGS

SEQ ID NO: 1676 - protein, 8 aa, Artificial Sequence
  cleavable linker
LFAAPFGS

SEQ ID NO: 1677 - protein, 8 aa, Artificial Sequence
  cleavable linker
LFVALKGS

SEQ ID NO: 1678 - protein, 7 aa, Artificial Sequence
  cleavable linker
LFVLKGS

SEQ ID NO: 1679 - protein, 7 aa, Artificial Sequence
  cleavable linker
LFVLRGS

SEQ ID NO: 1680 - protein, 6 aa, Artificial Sequence
  cleavable linker
LFVRGS

SEQ ID NO: 1681 - protein, 8 aa, Artificial Sequence
  cleavable linker
LFVRLRGS

SEQ ID NO: 1682 - protein, 9 aa, Artificial Sequence
  cleavable linker
LFVRVFLGS

SEQ ID NO: 1683 - protein, 6 aa, Artificial Sequence
  cleavable linker
LGERGS

SEQ ID NO: 1684 - protein, 7 aa, Artificial Sequence
  cleavable linker
LKALFGS

SEQ ID NO: 1685 - protein, 6 aa, Artificial Sequence
  cleavable linker
LKFFGS

SEQ ID NO: 1686 - protein, 7 aa, Artificial Sequence
  cleavable linker
LKIFVGS

SEQ ID NO: 1687 - protein, 7 aa, Artificial Sequence
  cleavable linker
LKLFVGS

SEQ ID NO: 1688 - protein, 7 aa, Artificial Sequence
  cleavable linker
LRALFGS

SEQ ID NO: 1689 - protein, 6 aa, Artificial Sequence
  cleavable linker
LRFFGS

SEQ ID NO: 1690 - protein, 7 aa, Artificial Sequence
  cleavable linker
LRIFVGS

SEQ ID NO: 1691 - protein, 7 aa, Artificial Sequence
  cleavable linker
LRLFVGS

SEQ ID NO: 1692 - protein, 6 aa, Artificial Sequence
  cleavable linker
RALFGS

SEQ ID NO: 1693 - protein, 6 aa, Artificial Sequence
  cleavable linker
RIFVGS

SEQ ID NO: 1694 - protein, 6 aa, Artificial Sequence
  cleavable linker
RLFVGS

SEQ ID NO: 1695 - protein, 8 aa, Artificial Sequence
  cleavable linker
RLRALFGS

SEQ ID NO: 1696 - protein, 7 aa, Artificial Sequence
  cleavable linker
RLRFFGS

SEQ ID NO: 1697 - protein, 8 aa, Artificial Sequence
  cleavable linker
RLRIFVGS

SEQ ID NO: 1698 - protein, 8 aa, Artificial Sequence
  cleavable linker
RLRLFVGS

SEQ ID NO: 1699 - protein, 8 aa, Artificial Sequence
  cleavable linker
RRKAFVGS

SEQ ID NO: 1700 - protein, 8 aa, Artificial Sequence
  cleavable linker
RRKLIFGS

SEQ ID NO: 1701 - protein, 8 aa, Artificial Sequence
  cleavable linker
RRRFFAGS

SEQ ID NO: 1702 - protein, 8 aa, Artificial Sequence
  cleavable linker
VFGRKGGS

SEQ ID NO: 1703 - protein, 7 aa, Artificial Sequence
  cleavable linker
YFVRKGS

SEQ ID NO: 1704 - protein, 8 aa, Artificial Sequence
  cleavable linker
GSAFVRLF

SEQ ID NO: 1705 - protein, 7 aa, Artificial Sequence
  cleavable linker
GSAKLFV

SEQ ID NO: 1706 - protein, 8 aa, Artificial Sequence
  cleavable linker
GSALFALK

SEQ ID NO: 1707 - protein, 7 aa, Artificial Sequence
  cleavable linker
GSALFLK

SEQ ID NO: 1708 - protein, 7 aa, Artificial Sequence
  cleavable linker
GSALFLR

SEQ ID NO: 1709 - protein, 6 aa, Artificial Sequence
  cleavable linker
GSALFR

SEQ ID NO: 1710 - protein, 8 aa, Artificial Sequence
  cleavable linker
GSALFRLR

SEQ ID NO: 1711 - protein, 8 aa, Artificial Sequence
  cleavable linker
GSALKALF

SEQ ID NO: 1712 - protein, 7 aa, Artificial Sequence
  cleavable linker
GSALKFF

SEQ ID NO: 1713 - protein, 8 aa, Artificial Sequence
  cleavable linker
GSALKFLV

SEQ ID NO: 1714 - protein, 8 aa, Artificial Sequence
  cleavable linker
GSALKIFV

SEQ ID NO: 1715 - protein, 8 aa, Artificial Sequence
  cleavable linker
GSALKLFV

SEQ ID NO: 1716 - protein, 8 aa, Artificial Sequence
  cleavable linker
GSFFADIK

SEQ ID NO: 1717 - protein, 7 aa, Artificial Sequence
  cleavable linker
GSFFALK

SEQ ID NO: 1718 - protein, 6 aa, Artificial Sequence
  cleavable linker
GSFFLK

SEQ ID NO: 1719 - protein, 6 aa, Artificial Sequence
  cleavable linker
GSFFLR

SEQ ID NO: 1720 - protein, 7 aa, Artificial Sequence
  cleavable linker
GSFFRLR

SEQ ID NO: 1721 - protein, 8 aa, Artificial Sequence
  cleavable linker
GSFGYRIK

SEQ ID NO: 1722 - protein, 7 aa, Artificial Sequence
  cleavable linker
GSFLRLF

SEQ ID NO: 1723 - protein, 7 aa, Artificial Sequence
  cleavable linker
GSFYARR

SEQ ID NO: 1724 - protein, 8 aa, Artificial Sequence
  cleavable linker
GSGGLRKK

SEQ ID NO: 1725 - protein, 8 aa, Artificial Sequence
  cleavable linker
GSIFVALK

SEQ ID NO: 1726 - protein, 7 aa, Artificial Sequence
  cleavable linker
GSIFVLK

SEQ ID NO: 1727 - protein, 7 aa, Artificial Sequence
  cleavable linker
GSIFVLR

SEQ ID NO: 1728 - protein, 6 aa, Artificial Sequence
  cleavable linker
GSIFVR

SEQ ID NO: 1729 - protein, 8 aa, Artificial Sequence
  cleavable linker
GSIFVRLR

SEQ ID NO: 1730 - protein, 8 aa, Artificial Sequence
  cleavable linker
GSILFNIK

SEQ ID NO: 1731 - protein, 8 aa, Artificial Sequence
  cleavable linker
GSLFAAPF

SEQ ID NO: 1732 - protein, 8 aa, Artificial Sequence
  cleavable linker
GSLFVALK

SEQ ID NO: 1733 - protein, 7 aa, Artificial Sequence
  cleavable linker
GSLFVLK

SEQ ID NO: 1734 - protein, 7 aa, Artificial Sequence
  cleavable linker
GSLFVLR

SEQ ID NO: 1735 - protein, 6 aa, Artificial Sequence
  cleavable linker
GSLFVR

SEQ ID NO: 1736 - protein, 8 aa, Artificial Sequence
  cleavable linker
GSLFVRLR

SEQ ID NO: 1737 - protein, 9 aa, Artificial Sequence
  cleavable linker
GSLFVRVFL

SEQ ID NO: 1738 - protein, 6 aa, Artificial Sequence
  cleavable linker
GSLGER

SEQ ID NO: 1739 - protein, 7 aa, Artificial Sequence
  cleavable linker
GSLKALF

SEQ ID NO: 1740 - protein, 6 aa, Artificial Sequence
  cleavable linker
GSLKFF

SEQ ID NO: 1741 - protein, 7 aa, Artificial Sequence
  cleavable linker
GSLKIFV

SEQ ID NO: 1742 - protein, 7 aa, Artificial Sequence
  cleavable linker
GSLKLFV

SEQ ID NO: 1743 - protein, 7 aa, Artificial Sequence
  cleavable linker
GSLRALF

SEQ ID NO: 1744 - protein, 6 aa, Artificial Sequence
  cleavable linker
GSLRFF

SEQ ID NO: 1745 - protein, 7 aa, Artificial Sequence
  cleavable linker
GSLRIFV

SEQ ID NO: 1746 - protein, 7 aa, Artificial Sequence
  cleavable linker
GSLRLFV

SEQ ID NO: 1747 - protein, 6 aa, Artificial Sequence
  cleavable linker
GSRALF

SEQ ID NO: 1748 - protein, 6 aa, Artificial Sequence
  cleavable linker
GSRIFV

SEQ ID NO: 1749 - protein, 6 aa, Artificial Sequence
  cleavable linker
GSRLFV

SEQ ID NO: 1750 - protein, 8 aa, Artificial Sequence
  cleavable linker
GSRLRALF

SEQ ID NO: 1751 - protein, 7 aa, Artificial Sequence
  cleavable linker
GSRLRFF

SEQ ID NO: 1752 - protein, 8 aa, Artificial Sequence
  cleavable linker
GSRLRIFV

SEQ ID NO: 1753 - protein, 8 aa, Artificial Sequence
  cleavable linker
GSRLRLFV

SEQ ID NO: 1754 - protein, 8 aa, Artificial Sequence
  cleavable linker
GSRRKAFV

SEQ ID NO: 1755 - protein, 8 aa, Artificial Sequence
  cleavable linker
GSRRKLIF

SEQ ID NO: 1756 - protein, 8 aa, Artificial Sequence
  cleavable linker
GSRRRFFA

SEQ ID NO: 1757 - protein, 8 aa, Artificial Sequence
  cleavable linker
GSVFGRKG

SEQ ID NO: 1758 - protein, 7 aa, Artificial Sequence
  cleavable linker
GSYFVRK

SEQ ID NO: 1759 - protein, 75 aa, Zea mays
QIFVKTLTGKTITLEVESSDTIDNVKAKIQDKEGIPPDQQRLIFAGKQLEDGRTLADYNIQKESTLHLVLRLRGG

SEQ ID NO: 1760 - protein, 10 aa, Artificial Sequence
  his-tag
HHHHHHHHHH

SEQ ID NO: 1761 - protein, 56 aa, Diguetia canities
AKDGDVEGPAGCKKYDVECDSGECCQKQYLWYKWRPLDCRCLKSGFFSSKCVCRDV

SEQ ID NO: 1762 - protein, 76 aa, Apomastus schlingeri
EIPQNLGSGIPHDKIKLPNGQWCKTPGDLCSSSSECCKAKHSNSVTYASFCSRQWSGQQALFINQCRTCNVESSMC

SEQ ID NO: 1763 - protein, 61 aa, Mesobuthus tamulus sindicus
DGYILMRNGCKIPCLFGNDGCNKECKAYGGSYGYCWTYGLACACEGQPEDKKHLNYHKKTC

SEQ ID NO: 1764 - protein, 51 aa, Eratigena agrestis
EPDEICRARMTHKEFNYKSNVCNGCGDQVAACEAECFRNDVYTACHEAQKG

SEQ ID NO: 1765 - protein, 51 aa, Eratigena agrestis
EPDEICRARMTNKEFTYKSNVCNNCGDQVAACEAECFRNDVYTACHEAQKG

SEQ ID NO: 1766 - protein, 39 aa, Calisoga sp.
CISARYPCSNSKDCCSGNCGTFWTCYIRKDPCSKECLAP

SEQ ID NO: 1767 - protein, 61 aa, Androctonus australis
DGYIKRHDGCKVTCLINDNYCDTECKREGGSYGYCYSVGFACWCEGLPDDKAWKSETNTCD

SEQ ID NO: 1768 - protein, 76 aa, Apomastus schlingeri
EIPQNLGSDIPHDIIKLPNGQWCKTPGALCSSRSECCKAKHSDSVTYSSGCSRQWSDQQGLFINQCRTCNVESSMC

SEQ ID NO: 1769 - protein, 64 aa, Hottentotta judaica
GRDAYIADNLNCAYTCGSNSYCNTECTKNGAVSGYCQWLGKYGNACWCINLPDKVPIRIPGACR

SEQ ID NO: 1770 - protein, 61 aa, Leiurus quinquestriatus quinquestriatus
DGYIRKRDGCKVSCLFGNEGCDKECKAYGGSYGYCWIWGLACWCEGLPDDKTWKSETNTCG

SEQ ID NO: 1771 - protein, 61 aa, Leiurus quinquestriatus hebraeus
DGYIRGGDGCKVSCVINHVFCDNECKAAGGSYGYCWAWGLACWCEGLPADREWDYETNTCG

SEQ ID NO: 1772 - protein, 61 aa, Leiurus quinquestriatus hebraeus
DGYIRGGDGCKVSCVINHVFCDNECKAAGGSYGYCWAWGLACWCEGLPAEREWDYETNTCG

SEQ ID NO: 1773 - protein, 61 aa, Leiurus quinquestriatus hebraeus
DGYIRGGDGCKVSCVIDHVFCDNECKAAGGSYGYCWGWGLACWCEGLPADREWKYETNTCG

SEQ ID NO: 1774 - protein, 41 aa, Brachypelma smithii
CLGENVPCDKDRPNCCSRYECLEPTGYGWWYASYYCYKKRS

SEQ ID NO: 1775 - protein, 46 aa, Plectreurys tristis
AVKCIGWQETCNGNLPCCNECVMCECNIMGQNCRCNHPKATNECES

1. A peptide comprised of either a binary or a tertiary peptide, that contains at least 4 amino acids and up to a maximum of 16 amino acids, comprised of 2 or 3 different regions, wherein the binary peptides have 2 different regions and the tertiary peptides have 3 different regions; wherein, the binary and tertiary peptide can be cleaved by both an animal gut protease and an insect or nematode gut protease.

2. The peptide of claim 1, wherein the binary peptide contains at least 4 amino acids and up to a maximum of 8 amino acids; and the peptide comprises 2 different regions, wherein one of the regions can be cleaved by an animal gut protease and the other region can be cleaved by an insect or nematode gut protease.

3. The peptide of claim 1, wherein the tertiary peptide contains at least 5 amino acids up to a maximum of 16 amino acids; and the tertiary peptide comprises a binary peptide and a spacer of 1 to 4 amino acids.

4. The peptide of claim 3, wherein the spacer comprises the amino acid sequence GS, WN, WQ, MA, MV, AM, LH, MN, ES, WQ, or DT.

5. The binary peptide of any one of claims 1-4, wherein the binary peptide comprises an amino acid sequence selected from the group consisting of: X₁-X₂-Y₁-Y₂, X₁-X₂-X₃-Y₁-Y₂, X₁-X₂-X₃-X₄-Y₁-Y₂, X₁-X₂-Y₁-Y₂-Y₃, X₁-X₂-X₃-Y₁-Y₂-Y₃, X₁-X₂-X₃-X₄-Y₁-Y₂-Y₃, X₁-X₂-Y₁-Y₂-Y₃-Y₄, X₁-X₂-X₃-Y₁-Y₂-Y₃-Y₄, X₁-X₂-X₃-X₄-Y₁-Y₂-Y₃-Y₄, Y₁-Y₂-X₁-X₂, Y₁-Y₂-X₁-X₂-X₃, Y₁-Y₂-X₁-X₂-X₃-X₄, Y₁-Y₂-Y₃-X₁-X₂, Y₁-Y₂-Y₃-X₁-X₂-X₃, Y₁-Y₂-Y₃-X₁-X₂-X₃-X₄, Y₁-Y₂-Y₃-Y₄-X₁-X₂, Y₁-Y₂-Y₃-Y₄-X₁-X₂-X₃, Y₁-Y₂-Y₃-Y₄-X₁-X₂-X₃-X₄, wherein each Xₙ and each Yₙ is an amino acid, and wherein each Xₙ and each Yₙ is an amino acid, and wherein X₁ is selected from the group consisting of: (all single letter amino acid format) A, D, E, G, I, K, L, N, P, Q, R, and V; X₂ is selected from the group consisting of A, F, G, I, K, L, N, P, Q, R, S, T, V, and Y; X₃ is selected from the group consisting of A, D, E, F, G, I, K, L, N, Q, R, S, T, V, and Y; X₄ is selected from the group consisting of: R, H, K, D, E, S, T, N, Q, G, A, I, L, M, F, W, Y, and V. In some embodiments, Y₁ is selected from the group consisting of: (all single letter amino acid format) A, D, E, F, G, I, L, N, Q, S, T, V, and Y; Y₂ is selected from the group consisting of F, G, I, L, and Y; and Y₃ is selected from the group consisting of A, D, E, F, G, I, K, L, R, S, T, V, and Y; and Y₄ is selected from the group consisting of: R, H, K, D, E, S, T, N, Q, G, A, I, L, M, F, W, Y, and V.

6. The peptide of any one of claims 1-5, wherein the binary peptide has an amino acid sequence: AFVRLF (SEQ ID NO: 1594), AKLFV (SEQ ID NO: 1595), ALFALK (SEQ ID NO: 1596), ALFLK (SEQ ID NO: 1597), ALFLR (SEQ ID NO: 1598), ALFR (SEQ ID NO: 1599), ALFRLR (SEQ ID NO: 1600), ALKALF (SEQ ID NO: 1601), ALKFF (SEQ ID NO: 1602), ALKFLV (SEQ ID NO: 1603), ALKIFV (SEQ ID NO: 1604), ALKLFV (SEQ ID NO: 1605), FFADIK (SEQ ID NO: 1606), FFALK (SEQ ID NO: 1607), FFLK (SEQ ID NO: 1608), FFLR (SEQ ID NO: 1609), FFRLR (SEQ ID NO: 1610), FGYRIK (SEQ ID NO: 1611), FLRLF (SEQ ID NO: 1612), FYARR (SEQ ID NO: 1613), GGLRKK (SEQ ID NO: 1614), IFVALK (SEQ ID NO: 1615), IFVLK (SEQ ID NO: 1616), IFVLR (SEQ ID NO: 1617), IFVR (SEQ ID NO: 1618), IFVRLR (SEQ ID NO: 1619), ILFNIK (SEQ ID NO: 1620), LFAAPF (SEQ ID NO: 1621), LFVALK (SEQ ID NO: 1622), LFVLK (SEQ ID NO: 1623), LFVLR (SEQ ID NO: 1624), LFVR (SEQ ID NO: 1625), LFVRLR (SEQ ID NO: 1626), LFVRVFL (SEQ ID NO: 1627), LGER (SEQ ID NO: 1628), LKALF (SEQ ID NO: 1629), LKFF (SEQ ID NO: 1630), LKIFV (SEQ ID NO: 1631), LKLFV (SEQ ID NO: 1632), LRALF (SEQ ID NO: 1633), LRFF (SEQ ID NO: 1634), LRIFV (SEQ ID NO: 1635), LRLFV (SEQ ID NO: 1636), RALF (SEQ ID NO: 1637), RIFV (SEQ ID NO: 1638), RLFV (SEQ ID NO: 1639), RLRALF (SEQ ID NO: 1640), RLRFF (SEQ ID NO: 1641), RLRIFV (SEQ ID NO: 1642), RLRLFV (SEQ ID NO: 1643), RRKAFV (SEQ ID NO: 1644), RRKLIF (SEQ ID NO: 1645), RRRFFA (SEQ ID NO: 1646), VFGRKG (SEQ ID NO: 1647), and YFVRK (SEQ ID NO: 1648).

7. The peptide of claim 6, wherein the binary peptide has an amino acid sequence: IFVALK (SEQ ID NO: 1615), IFVRLR (SEQ ID NO: 1619), ALKLFV (SEQ ID NO: 1605), ALKFLV (SEQ ID NO: 1603), RRKAFV (SEQ ID NO: 1644), LFAAPF (SEQ ID NO: 1621), LFVALK (SEQ ID NO: 1622), LRLFV (SEQ ID NO: 1636), LFVRLR (SEQ ID NO: 1626), or LKLFV (SEQ ID NO: 1632).

8. The peptide of claim 1, wherein the tertiary peptide comprises an amino acid sequence of IFVALKGS (SEQ ID NO: 1670), IFVRLRGS (SEQ ID NO: 1674), ALKLFVGS (SEQ ID NO: 1660), ALKFLVGS (SEQ ID NO: 1658), RRKAFVGS (SEQ ID NO: 1699), LFAAPFGS (SEQ ID NO: 1676), LFVALKGS (SEQ ID NO: 1677), LRLFVGS (SEQ ID NO: 1691), LFVRLRGS (SEQ ID NO: 1681), or LKLFVGS (SEQ ID NO: 1687).

9. The peptide of any one of claims 1-7, wherein the binary peptide has an amino acid sequence IFVRLR (SEQ ID NO: 1619), ALKLFV (SEQ ID NO: 1605), ALKFLV (SEQ ID NO: 1603), RRKAFV (SEQ ID NO: 1644), or LFAAPF (SEQ ID NO: 1621).

10. The peptide of claims 1-9, wherein the tertiary peptide comprises an amino acid sequence of: IFVRLRGS (SEQ ID NO: 1674), ALKLFVGS (SEQ ID NO: 1660), ALKFLVGS (SEQ ID NO: 1658), RRKAFVGS (SEQ ID NO: 1699), LFAAPFGS (SEQ ID NO: 1676), GSIFVRLR (SEQ ID NO: 1729), GSALKLFV (SEQ ID NO: 1715), GSALKFLV (SEQ ID NO: 1713), GSRRKAFV (SEQ ID NO: 1754), or GSLFAAPF (SEQ ID NO: 1731).

11. The peptide of any one of claims 1-10, wherein the binary or tertiary peptide is linked to a toxic protein (TP).

12. The peptide of claim 11, further comprising a second binary or tertiary peptide linked in frame to the C-terminus of the TP.

13. The peptide of any one of claims 1-12, wherein the binary or tertiary peptide is linked to the C-terminus of an Endoplasmic Reticulum Signal Peptide (ERSP).

14. An insecticidal and/or nematicidal protein having one or more cleavable linking peptides, the insecticidal and/or nematicidal protein comprising an ERSP fused in frame with the N-terminus of a binary or tertiary peptide, the binary or tertiary peptide is fused in frame with a construct comprising: (L-TP)ₙ, (L-TP)ₙ-L, (TP-L)ₙ, or L-(TP-L)ₙ, wherein TP is a toxic protein, L is a binary or tertiary peptide and n is an integer ranging from 1 to 200.

15. The peptide or insecticidal and/or nematicidal protein of any one of claims 1-14, wherein the insect protease is a protease derived from a Lepidoptera or a Coleoptera insect species.

16. The peptide or insecticidal and/or nematicidal protein of any one of claims 1-15, wherein the animal gut protease is a human gastrointestinal protease.

17. The peptide or insecticidal and/or nematicidal protein of any one of claims 1-16, wherein the TP is a protein selected from the group consisting of a Pore Forming Insecticidal Protein (PFIP) and a Cysteine Rich Insecticidal Protein (CRIP).

18. The peptide or insecticidal and/or nematicidal protein of any one of claims 1-17, wherein the TP is a peptide or protein having at least 80%, at least 85%, at least 90%, at least 95%, at least 96%, at least 97%, at least 98%, at least 99%, or at least 100% sequence identity or sequence homology to a peptide or protein having an amino acid sequence as set forth in SEQ ID NOs: 5-1593 and 1761-1775.

19. The peptide or insecticidal and/or nematicidal protein of any one of claims 1-18, wherein the TP is a peptide or protein having at least 80%, at least 85%, at least 90%, at least 95%, at least 96%, at least 97%, at least 98%, at least 99%, or at least 100% sequence identity or sequence homology to a peptide or protein having an amino acid sequence as set forth in SEQ ID NOs: 5, 6 and 1761, 1762, 1767, 1771-1773, and variants thereof.

20. The peptide or insecticidal and/or nematicidal protein of claim 19, wherein the TP is a peptide having an amino acid sequence of any one of SEQ ID NOs: 5, 6, 1761, 1762, 1767, 1771-1773, or variants thereof.

21. A polynucleotide encoding a peptide or insecticidal and/or nematicidal protein of any one of claims 1-20.

22. A vector comprising a polynucleotide of claim 21.

23. A bacterial host cell, a yeast host cell, a plant host cell or an animal host cell comprising a vector of claim 22.

24. A DNA construct comprising a polynucleotide linked to an operable promoter, wherein said polynucleotide encodes: a cleavable peptide comprising either a binary or a tertiary peptide, said cleavable peptide containing at least 4 amino acids and up to a maximum of 16 amino acids, and is comprised of 2 or 3 different regions, wherein the binary peptide has 2 different regions and the tertiary peptide has 3 different regions; wherein the cleavable peptide can be cleaved by both an animal gut protease and an insect or nematode gut protease, and the polynucleotide further encodes a toxic peptide fused in frame with said cleavable peptide.

25. The DNA construct of claim 24, wherein the tertiary peptide contains at least 5 amino acids up to a maximum of 16 amino acids; and the tertiary peptide comprises a binary peptide and a spacer of 1 to 4 amino acids.

26. The DNA construct of claim 25, wherein the spacer comprises the amino acid sequence GS, WN, WQ, MA, MV, AM, LH, MN, ES, WQ, or DT.

27. The DNA construct of any one of claims 24-26, wherein the binary peptide comprises an amino acid sequence of: X₁-X₂-Y₁-Y₂, X₁-X₂-X₃-Y₁-Y₂, X₁-X₂-X₃-X₄-Y₁-Y₂, X₁-X₂-Y₁-Y₂-Y₃, X₁-X₂-X₃-Y₁-Y₂-Y₃, X₁-X₂-X₃-X₄-Y₁-Y₂-Y₃, X₁-X₂-Y₁-Y₂-Y₃-Y₄, X₁-X₂-X₃-Y₁-Y₂-Y₃-Y₄, X₁-X₂-X₃-X₄-Y₁-Y₂-Y₃-Y₄, Y₁-Y₂-X₁-X₂, Y₁-Y₂-X₁-X₂-X₃, Y₁-Y₂-X₁-X₂-X₃-X₄, Y₁-Y₂-Y₃-X₁-X₂, Y₁-Y₂-Y₃-X₁-X₂-X₃, Y₁-Y₂-Y₃-X₁-X₂-X₃-X₄, Y₁-Y₂-Y₃-Y₄-X₁-X₂, Y₁-Y₂-Y₃-Y₄-X₁-X₂-X₃, Y₁-Y₂-Y₃-Y₄-X₁-X₂-X₃-X₄, wherein each Xₙ and each Yₙ is an amino acid, and wherein each Xn and each Yn is an amino acid, and wherein X₁ is selected from the group consisting of: (all single letter amino acid format) A, D, E, G, I, K, L, N, P, Q, R, and V; X₂ is selected from the group consisting of A, F, G, I, K, L, N, P, Q, R, S, T, V, and Y; X₃ is selected from the group consisting of A, D, E, F, G, I, K, L, N, Q, R, S, T, V, and Y; X₄ is selected from the group consisting of: R, H, K, D, E, S, T, N, Q, G, A, I, L, M, F, W, Y, and V. In some embodiments, Y₁ is selected from the group consisting of: (all single letter amino acid format) A, D, E, F, G, I, L, N, Q, S, T, V, and Y; Y₂ is selected from the group consisting of F, G, I, L, and Y; and Y₃ is selected from the group consisting of A, D, E, F, G, I, K, L, R, S, T, V, and Y; and Y₄ is selected from the group consisting of: R, H, K, D, E, S, T, N, Q, G, A, I, L, M, F, W, Y, and V.

28. The DNA construct of claim 27, wherein the binary peptide comprises the amino acid sequence: AFVRLF (SEQ ID NO: 1594), AKLFV (SEQ ID NO: 1595), ALFALK (SEQ ID NO: 1596), ALFLK (SEQ ID NO: 1597), ALFLR (SEQ ID NO: 1598), ALFR (SEQ ID NO: 1599), ALFRLR (SEQ ID NO: 1600), ALKALF (SEQ ID NO: 1601), ALKFF (SEQ ID NO: 1602), ALKFLV (SEQ ID NO: 1603), ALKIFV (SEQ ID NO: 1604), ALKLFV (SEQ ID NO: 1605), FFADIK (SEQ ID NO: 1606), FFALK (SEQ ID NO: 1607), FFLK (SEQ ID NO: 1608), FFLR (SEQ ID NO: 1609), FFRLR (SEQ ID NO: 1610), FGYRIK (SEQ ID NO: 1611), FLRLF (SEQ ID NO: 1612), FYARR (SEQ ID NO: 1613), GGLRKK (SEQ ID NO: 1614), IFVALK (SEQ ID NO: 1615), IFVLK (SEQ ID NO: 1616), IFVLR (SEQ ID NO: 1617), IFVR (SEQ ID NO: 1618), IFVRLR (SEQ ID NO: 1619), ILFNIK (SEQ ID NO: 1620), LFAAPF (SEQ ID NO: 1621), LFVALK (SEQ ID NO: 1622), LFVLK (SEQ ID NO: 1623), LFVLR (SEQ ID NO: 1624), LFVR (SEQ ID NO: 1625), LFVRLR (SEQ ID NO: 1626), LFVRVFL (SEQ ID NO: 1627), LGER (SEQ ID NO: 1628), LKALF (SEQ ID NO: 1629), LKFF (SEQ ID NO: 1630), LKIFV (SEQ ID NO: 1631), LKLFV (SEQ ID NO: 1632), LRALF (SEQ ID NO: 1633), LRFF (SEQ ID NO: 1634), LRIFV (SEQ ID NO: 1635), LRLFV (SEQ ID NO: 1636), RALF (SEQ ID NO: 1637), RIFV (SEQ ID NO: 1638), RLFV (SEQ ID NO: 1639), RLRALF (SEQ ID NO: 1640), RLRFF (SEQ ID NO: 1641), RLRIFV (SEQ ID NO: 1642), RLRLFV (SEQ ID NO: 1643), RRKAFV (SEQ ID NO: 1644), RRKLIF (SEQ ID NO: 1645), RRRFFA (SEQ ID NO: 1646), VFGRKG (SEQ ID NO: 1647), and YFVRK (SEQ ID NO: 1648).

29. The DNA construct of claim 28, wherein the binary peptide comprises an amino acid sequence: IFVRLR (SEQ ID NO: 1619), ALKLFV (SEQ ID NO: 1605, ALKFLV (SEQ ID NO: 1603), RRKAFV (SEQ ID NO: 1644), or LFAAPF (SEQ ID NO: 1621).

30. The DNA construct of claim 24, wherein said polynucleotide encodes a tertiary peptide comprising the amino acid sequence:
(SEQ ID NO: 1649)
AFVRLFGS,
(SEQ ID NO: 1650)
AKLFVGS,
(SEQ ID NO: 1651)
ALFALKGS,
(SEQ ID NO: 1652)
ALFLKGS,
(SEQ ID NO: 1653)
ALFLRGS,
(SEQ ID NO: 1654)
ALFRGS,
(SEQ ID NO: 1655)
ALFRLRGS,
(SEQ ID NO: 1656)
ALKALFGS,
(SEQ ID NO: 1657)
ALKFFGS,
(SEQ ID NO: 1658)
ALKFLVGS,
(SEQ ID NO: 1659)
ALKIFVGS,
(SEQ ID NO: 1660)
ALKLFVGS,
(SEQ ID NO: 1661)
FFADIKGS,
(SEQ ID NO: 1662)
FFALKGS,
(SEQ ID NO: 1663)
FFLKGS,
(SEQ ID NO: 1664)
FFLRGS,
(SEQ ID NO: 1665)
FFRLRGS,
(SEQ ID NO: 1666)
FGYRIKGS,
(SEQ ID NO: 1667)
FLRLFGS,
(SEQ ID NO: 1668)
FYARRGS,
(SEQ ID NO: 1669)
GGLRKKGS,
(SEQ ID NO: 1670)
IFVALKGS,
(SEQ ID NO: 1671)
IFVLKGS,
(SEQ ID NO: 1672)
IFVLRGS,
(SEQ ID NO: 1673)
IFVRGS,
(SEQ ID NO: 1674)
IFVRLRGS,
(SEQ ID NO: 1675)
ILFNIKGS,
(SEQ ID NO: 1676)
LFAAPFGS,
(SEQ ID NO: 1677)
LFVALKGS,
(SEQ ID NO: 1678)
LFVLKGS,
(SEQ ID NO: 1679)
LFVLRGS,
(SEQ ID NO: 1680)
LFVRGS,
(SEQ ID NO: 1681)
LFVRLRGS,
(SEQ ID NO: 1682)
LFVRVFLGS,
(SEQ ID NO: 1683)
LGERGS,
(SEQ ID NO: 1684)
LKALFGS,
(SEQ ID NO: 1685)
LKFFGS,
(SEQ ID NO: 1686)
LKIFVGS,
(SEQ ID NO: 1687)
LKLFVGS,
(SEQ ID NO: 1688)
LRALFGS,
(SEQ ID NO: 1689)
LRFFGS,
(SEQ ID NO: 1690)
LRIFVGS,
(SEQ ID NO: 1691)
LRLFVGS,
(SEQ ID NO: 1692)
RALFGS,
(SEQ ID NO: 1693)
RIFVGS,
(SEQ ID NO: 1694)
RLFVGS,
(SEQ ID NO: 1695)
RLRALFGS,
(SEQ ID NO: 1696)
RLRFFGS,
(SEQ ID NO: 1697)
RLRIFVGS,
(SEQ ID NO: 1698)
RLRLFVGS,
(SEQ ID NO: 1699)
RRKAFVGS,
(SEQ ID NO: 1700)
RRKLIFGS,
(SEQ ID NO: 1701)
RRRFFAGS,
(SEQ ID NO: 1702)
VFGRKGGS,
(SEQ ID NO: 1703)
YFVRKGS.
(SEQ ID NO: 1704)
GSAFVRLF,
(SEQ ID NO: 1705)
GSAKLFV,
(SEQ ID NO: 1706)
GSALFALK,
(SEQ ID NO: 1707)
GSALFLK,
(SEQ ID NO: 1708)
GSALFLR,
(SEQ ID NO: 1709)
GSALFR,
(SEQ ID NO: 1710)
GSALFRLR,
(SEQ ID NO: 1711)
GSALKALF,
(SEQ ID NO: 1712)
GSALKFF,
(SEQ ID NO: 1713)
GSALKFLV,
(SEQ ID NO: 1714)
GSALKIFV,
(SEQ ID NO: 1715)
GSALKLFV,
(SEQ ID NO: 1716)
GSFFADIK,
(SEQ ID NO: 1717)
GSFFALK,
(SEQ ID NO: 1718)
GSFFLK,
(SEQ ID NO: 1719)
GSFFLR,
(SEQ ID NO: 1720)
GSFFRLR,
(SEQ ID NO: 1721)
GSFGYRIK,
(SEQ ID NO: 1722)
GSFLRLF,
(SEQ ID NO: 1723)
GSFYARR,
(SEQ ID NO: 1724)
GSGGLRKK,
(SEQ ID NO: 1725)
GSIFVALK,
(SEQ ID NO: 1726)
GSIFVLK,
(SEQ ID NO: 1727)
GSIFVLR,
(SEQ ID NO: 1728)
GSIFVR,
(SEQ ID NO: 1729)
GSIFVRLR,
(SEQ ID NO: 1730)
GSILFNIK,
(SEQ ID NO: 1731)
GSLFAAPF,
(SEQ ID NO: 1732)
GSLFVALK,
(SEQ ID NO: 1733)
GSLFVLK,
(SEQ ID NO: 1734)
GSLFVLR,
(SEQ ID NO: 1735)
GSLFVR,
(SEQ ID NO: 1736)
GSLFVRLR,
(SEQ ID NO: 1737)
GSLFVRVFL,
(SEQ ID NO: 1738)
GSLGER,
(SEQ ID NO: 1739)
GSLKALF,
(SEQ ID NO: 1740)
GSLKFF,
(SEQ ID NO: 1741)
GSLKIFV,
(SEQ ID NO: 1742)
GSLKLFV,
(SEQ ID NO: 1743)
GSLRALF,
(SEQ ID NO: 1744)
GSLRFF,
(SEQ ID NO: 1745)
GSLRIFV,
(SEQ ID NO: 1746)
GSLRLFV,
(SEQ ID NO: 1747)
GSRALF,
(SEQ ID NO: 1748)
GSRIFV,
(SEQ ID NO: 1749)
GSRLFV,
(SEQ ID NO: 1750)
GSRLRALF,
(SEQ ID NO: 1751)
GSRLRFF,
(SEQ ID NO: 1752)
GSRLRIFV,
(SEQ ID NO: 1753)
GSRLRLFV,
(SEQ ID NO: 1754)
GSRRKAFV,
(SEQ ID NO: 1755)
GSRRKLIF,
(SEQ ID NO: 1756)
GSRRRFFA,
(SEQ ID NO: 1757)
GSVFGRKG,
and
(SEQ ID NO: 1758)
GSYFVRK.

31. The DNA construct of claim 24, wherein said insect protease is a protease derived from a Lepidoptera or a Coleoptera insect species.

32. The DNA construct of claim 24, wherein said animal gut protease is a human gastrointestinal protease.

33. The DNA construct of any one of claims 24-32, wherein the TP is a peptide or protein selected from the group consisting of a Pore Forming Insecticidal Protein (PFIP) and a Cysteine Rich Insecticidal Protein (CRIP).

34. The DNA construct of claim 33, wherein the TP is a peptide or protein having at least 80%, at least 85%, at least 90%, at least 95%, at least 96%, at least 97%, at least 98%, at least 99%, or at least 100% sequence identity or sequence homology to a peptide or protein having an amino acid sequence as set forth in SEQ ID NOs: 5-1593 and 1761-1775.

35. The DNA construct of claim 34, wherein the TP is a peptide or protein having at least 80%, at least 85%, at least 90%, at least 95%, at least 96%, at least 97%, at least 98%, at least 99%, or at least 100% sequence identity or sequence homology to a peptide or protein having an amino acid sequence as set forth in SEQ ID NOs: 5, 6 and 1761, 1762, 1767, 1771-1773, and variants thereof.

36. The DNA construct of claim 35, wherein the TP is a peptide or protein having an amino acid sequence of any one of SEQ ID NOs: 5, 6, 1761, 1762, 1767, 1771-1773, or variants thereof.

37. A host cell comprising a DNA construct of any one of claims 24-36.

38. The host cell of claim 37, comprising a DNA construct of claim 35.

39. The host cell of claim 37, wherein said host cell is a bacterial cell, a yeast cell, a plant cell, or an animal cell.

40. The host cell of claim 39, wherein said bacterial cell is selected from the group consisting of an Agrobacterium, a Bacillus, an Escherichia, a Salmonella, a Pseudomonas, and a Rhizobium cell.

41. The host cell of claim 39, wherein said plant cell is selected from the group consisting of: alfalfa, banana, barley, bean, broccoli, cabbage, canola, carrot, cassava, castor, cauliflower, celery, chickpea, Chinese cabbage, citrus, coconut, coffee, corn, clover, cotton, a cucurbit, cucumber, Douglas fir, eggplant, eucalyptus, flax, garlic, grape, hops, leek, lettuce, Loblolly pine, millets, melons, nut, oat, olive, onion, ornamental, palm, pasture grass, pea, peanut, pepper, pigeonpea, pine, potato, poplar, pumpkin, Radiata pine, radish, rapeseed, rice, rootstocks, rye, safflower, shrub, sorghum, Southern pine, soybean, spinach, squash, strawberry, sugar beet, sugarcane, sunflower, sweet corn, sweet gum, sweet potato, switchgrass, tea, tobacco, tomato, triticale, turf grass, watermelon, and a wheat plant cell.

42. A plant, or part thereof comprising a polynucleotide linked to an operable promoter, wherein said polynucleotide encodes: a cleavable peptide comprising either a binary or a tertiary peptide, said cleavable peptide containing at least 4 amino acids and up to a maximum of 16 amino acids, and is comprised of 2 or 3 different regions, wherein the binary peptide has 2 different regions and the tertiary peptide has 3 different regions; wherein the cleavable peptide can be cleaved by both an animal gut protease and an insect or nematode gut protease, and wherein the polynucleotide further encodes a toxic peptide fused in frame with said cleavable peptide.

43. The plant, or part thereof, of claim 42, wherein said plant is elected from the group consisting of a alfalfa, banana, barley, bean, broccoli, cabbage, canola, carrot, cassava, castor, cauliflower, celery, chickpea, Chinese cabbage, citrus, coconut, coffee, corn, clover, cotton, a cucurbit, cucumber, Douglas fir, eggplant, eucalyptus, flax, garlic, grape, hops, leek, lettuce, Loblolly pine, millets, melons, nut, oat, olive, onion, ornamental, palm, pasture grass, pea, peanut, pepper, pigeonpea, pine, potato, poplar, pumpkin, Radiata pine, radish, rapeseed, rice, rootstocks, rye, safflower, shrub, sorghum, Southern pine, soybean, spinach, squash, strawberry, sugar beet, sugarcane, sunflower, sweet corn, sweet gum, sweet potato, switchgrass, tea, tobacco, tomato, triticale, turf grass, watermelon, and a wheat plant, and wherein said part is selected from the group consisting of a leaf, a stem a flower, a sepal, a fruit, a root, or a seed.

44. A method of controlling a pest infection of a plant, said method comprising providing in a diet of the pest, a plant, or part thereof, the plant or part thereof expressing an insecticidal and/or nematicidal protein, or coated at least on a portion of the plant or part thereof, a composition comprising an insecticidal and/or nematicidal protein, wherein the insecticidal and/or nematicidal protein comprises one or more cleavable binary or tertiary peptides, and one or more TPs, wherein the binary and tertiary peptide can be cleaved by both an animal gut protease and an insect or nematode gut protease.

45. The method of controlling a pest infection of a plant of claim 44, wherein said cleavable binary peptide comprises an amino acid sequence: X₁-X₂-Y₁-Y₂, X₁-X₂-X₃-Y₁-Y₂, X₁-X₂-X₃-X₄-Y₁-Y₂, X₁-X₂-Y₁-Y₂-Y₃, X₁-X₂-X₃-Y₁-Y₂-Y₃, X₁-X₂-X₃-X₄-Y₁-Y₂-Y₃, X₁-X₂-Y₁-Y₂-Y₃-Y₄, X₁-X₂-X₃-Y₁-Y₂-Y₃-Y₄, X₁-X₂-X₃-X₄-Y₁-Y₂-Y₃-Y₄, Y₁-Y₂-X₁-X₂, Y₁-Y₂-X₁-X₂-X₃, Y₁-Y₂-X₁-X₂-X₃-X₄, Y₁-Y₂-Y₃-X₁-X₂, Y₁-Y₂-Y₃-X₁-X₂-X₃, Y₁-Y₂-Y₃-X₁-X₂-X₃-X₄, Y₁-Y₂-Y₃-Y₄-X₁-X₂, Y₁-Y₂-Y₃-Y₄-X₁-X₂-X₃, Y₁-Y₂-Y₃-Y₄-X₁-X₂-X₃-X₄, wherein each Xₙ and each Yₙ is an amino acid, and wherein each Xₙ and each Yₙ is an amino acid, and wherein X₁ is selected from the group consisting of: (all single letter amino acid format) A, D, E, G, I, K, L, N, P, Q, R, and V; X₂ is selected from the group consisting of A, F, G, I, K, L, N, P, Q, R, S, T, V, and Y; X₃ is selected from the group consisting of A, D, E, F, G, I, K, L, N, Q, R, S, T, V, and Y; X₄ is selected from the group consisting of: R, H, K, D, E, S, T, N, Q, G, A, I, L, M, F, W, Y, and V. In some embodiments, Y₁ is selected from the group consisting of: (all single letter amino acid format) A, D, E, F, G, I, L, N, Q, S, T, V, and Y; Y₂ is selected from the group consisting of F, G, I, L, and Y; and Y₃ is selected from the group consisting of A, D, E, F, G, I, K, L, R, S, T, V, and Y; and Y₄ is selected from the group consisting of: R, H, K, D, E, S, T, N, Q, G, A, I, L, M, F, W, Y, and V.

46. The method of controlling a pest infection of a plant of claim 44, wherein the binary peptide comprises an amino acid sequence of:
(SEQ ID NO: 1594)
AFVRLF,
(SEQ ID NO: 1595)
AKLFV,
(SEQ ID NO: 1596)
ALFALK,
(SEQ ID NO: 1597)
ALFLK,
(SEQ ID NO: 1598)
ALFLR,
(SEQ ID NO: 1599)
ALFR,
(SEQ ID NO: 1600)
ALFRLR,
(SEQ ID NO: 1601)
ALKALF,
(SEQ ID NO: 1602)
ALKFF,
(SEQ ID NO: 1603)
ALKFLV,
(SEQ ID NO: 1604)
ALKIFV,
(SEQ ID NO: 1605)
ALKLFV,
(SEQ ID NO: 1606)
FFADIK,
(SEQ ID NO: 1607)
FFALK,
(SEQ ID NO: 1608)
FFLK,
(SEQ ID NO: 1609)
FFLR,
(SEQ ID NO: 1610)
FFRLR,
(SEQ ID NO: 1611)
FGYRIK,
(SEQ ID NO: 1612)
FLRLF,
(SEQ ID NO: 1613)
FYARR,
(SEQ ID NO: 1614)
GGLRKK,
(SEQ ID NO: 1615)
IFVALK,
(SEQ ID NO: 1616)
IFVLK,
(SEQ ID NO: 1617)
IFVLR,
(SEQ ID NO: 1618)
IFVR,
(SEQ ID NO: 1619)
IFVRLR,
(SEQ ID NO: 1620)
ILFNIK,
(SEQ ID NO: 1621)
LFAAPF,
(SEQ ID NO: 1622)
LFVALK,
(SEQ ID NO: 1623)
LFVLK,
(SEQ ID NO: 1624)
LFVLR,
(SEQ ID NO: 1625)
LFVR,
(SEQ ID NO: 1626)
LFVRLR,
(SEQ ID NO: 1627)
LFVRVFL,
(SEQ ID NO: 1628)
LGER,
(SEQ ID NO: 1629)
LKALF,
(SEQ ID NO: 1630)
LKFF,
(SEQ ID NO: 1631)
LKIFV,
(SEQ ID NO: 1632)
LICLFV,
(SEQ ID NO: 1633)
LRALF,
(SEQ ID NO: 1634)
LRFF,
(SEQ ID NO: 1635)
LRIFV,
(SEQ ID NO: 1636)
LRLFV,
(SEQ ID NO: 1637)
RALF,
(SEQ ID NO: 1638)
RIFV,
(SEQ ID NO: 1639)
RLFV,
(SEQ ID NO: 1640)
RLRALF,
(SEQ ID NO: 1641)
RLRFF,
(SEQ ID NO: 1642)
RLRIFV,
(SEQ ID NO: 1643)
RLRLFV,
(SEQ ID NO: 1644)
RRKAFV,
(SEQ ID NO: 1645)
RRKLIF,
(SEQ ID NO: 1646)
RRRFFA,
(SEQ ID NO: 1647)
VFGRKG,
and
(SEQ ID NO: 1648)
YFVRK.

47. The method of controlling a pest infection of a plant of claim 46, wherein the binary peptide comprises an amino sequence IFVRLR (SEQ ID NO: 1619), ALKLFV (SEQ ID NO: 1605), ALKFLV (SEQ ID NO: 1603), RRKAFV (SEQ ID NO: 1644), or LFAAPF (SEQ ID NO: 1621).

48. The method of controlling a pest infection of a plant of claim 44, wherein the cleavable tertiary peptide at least 5 amino acids up to a maximum of 16 amino acids; and the tertiary peptide comprises a binary peptide and a spacer of 1 to 4 amino acids.

49. The method of controlling a pest infection of a plant of claim 48, wherein the tertiary peptide comprises a binary peptide fused at its C-terminus to a di-peptide comprising the amino acid sequence GS, WN, WQ, MA, MV, AM, LH, MN, ES, WQ, or DT.

50. The method of controlling a pest infection of a plant of claim 44, wherein the insect protease is a protease derived from a Lepidoptera or a Coleoptera insect species.

51. The method of controlling a pest infection of a plant of claim 44, wherein the animal gut protease is a human gastrointestinal protease.

52. The method of controlling a pest infection of a plant of any one of claims 44-51, wherein the TP is a protein selected from the group consisting of a Pore Forming Insecticidal Protein (PFIP) and a Cysteine Rich Insecticidal Protein (CRIP).

53. The method of controlling a pest infection of a plant of claim 44, wherein said pest is an insect or a nematode.

54. The method of controlling a pest infection of a plant of claim 53, wherein said pest is an insect, from the insect order selected from the group consisting of Coleoptera and Lepidoptera.

55. The method of controlling a pest infection of a plant of 44, wherein said TP is a peptide or protein selected from the group consisting of: a Pore Forming Insecticidal Protein (PFIP) and a Cysteine Rich Insecticidal Peptide (CRIP).

56. The method of controlling a pest infection of a plant of 55, wherein the TP is an Inhibitor Cysteine Knot (ICK) motif protein or a non-ICK protein.

57. The method of controlling a pest infection of a plant of claim 56, wherein the TP is a peptide or protein having at least 80%, at least 85%, at least 90%, at least 95%, at least 96%, at least 97%, at least 98%, at least 99%, or at least 100% sequence identity or sequence homology to a peptide or protein having an amino acid sequence as set forth in SEQ ID NOs: 5, 6 and 1761, 1762, 1767, 1771-1773, or variants thereof.

58. The method of controlling a pest infection of a plant of claim 57, wherein the TP is a peptide or protein having an amino acid sequence of any one of SEQ ID NOs: 5, 6, 1761, 1762, 1767, 1771-1773, or variants thereof.

59. The method of controlling a pest infection of a plant of claim 44, wherein a pesticidally effective amount of said TP is provided by the plant, which is a recombinant plant, a part of the plant, or a product of the plant or the plant part.

60. The method of controlling a pest infection of a plant of claim 44, wherein a pesticidally effective amount of said insecticidal and/or nematicidal protein is provided in one or more formulations topically applied on the plant or a part of the plant, said one or more formulations comprising bacterial cells, bacterial spores, fungal cells, fungal spores, or parasporal crystals that comprise said insecticidal and/or nematicidal protein.
